(19) United States
(12) Patent Application Publication
(10) Pub. No.: US 2011/0064650 A1
(43) Pub. Date: Mar. 17, 2011

(54) MICROORGANISMS FOR PREVENTING AND TREATING NEOPLASMS ACCOMPANYING CELLULAR THERAPY

(76) Inventor: Aladar A. Szalay, Highland, CA (US)

(21) Appl. No.: 12/736,826

(22) PCT Filed: May 15, 2009
(86) PCT No.: PCT/US2009/003061

§ 371 Date: Nov. 10, 2010

Related U.S. Application Data
(60) Provisional application No. 61/054,025, filed on May 16, 2008.

(51) Int. Cl. A61K 51/00; A61K 35/76; A61K 49/00; A61B 5/055; A61P 35/00

(52) U.S. Cl. 424/1.11; 424/93.6; 424/9.1; 424/9.6; 424/9.3

(57) ABSTRACT

Provided are methods for using cellular compositions in combination with oncolytic viruses. The methods include administering oncolytic viruses for the inhibition and treatment of tumors caused by administration of cellular therapies, such as stem cell therapies. The methods also include contacting cellular compositions with oncolytic viruses for the removal of neoplastic cells prior to administration of the cellular composition for therapy. Diagnostic methods for monitoring treatment also are provided.

### RELATED APPLICATIONS

[0001] Benefit of priority is claimed to U.S. Provisional Application Ser. No. 61/054,025, to Aladar A. Szalay, filed on May 16, 2008, entitled “MICROORGANISMS FOR STEM CELL TREATMENTS.” Where permitted, the subject matter of this application is incorporated by reference in its entirety.

[0002] This application is related to U.S. application Ser. No. 12/218,953, filed on Jul. 18, 2008, entitled “USE OF MODIFIED VACCINIA VIRUS STRAINS IN COMBINATION WITH A CHEMOTHERAPEUTIC AGENT FOR USE IN THERAPEUTIC METHODS,” to International Application No. PCT/US2008/008832, filed on Jul. 18, 2008, entitled “USE OF MODIFIED VACCINIA VIRUS STRAINS IN COMBINATION WITH A CHEMOTHERAPEUTIC AGENT FOR USE IN THERAPEUTIC METHODS.”

[0003] This application also is related to U.S. application Ser. No. 11/975,088, filed on Oct. 16, 2007, entitled “METHODS FOR ATTENUATING VIRUS STRAINS FOR DIAGNOSTIC AND THERAPEUTIC USES,” to U.S. application Ser. No. 11/975,090, filed on Oct. 16, 2007, entitled “MODIFIED VACCINIA VIRUS STRAINS FOR USE IN DIAGNOSTIC AND THERAPEUTIC METHODS,” to U.S. application Ser. No. 12/080,766, filed on Apr. 4, 2008, entitled “MODIFIED VACCINIA VIRUS STRAINS FOR USE IN DIAGNOSTIC AND THERAPEUTIC METHODS,” and to International Application No. PCT/US2007/022172, filed on Oct. 16, 2007, entitled “MODIFIED VACCINIA VIRUS STRAINS FOR USE IN DIAGNOSTIC AND THERAPEUTIC METHODS.”

[0004] This application also is related to U.S. application Ser. No. 12/157,960, filed on Jun. 13, 2008, entitled “MICROORGANISMS FOR IMAGING AND/OR TREATMENT OF TUMORS” and to International Application No. PCT/US2008/007377, filed on Jun. 13, 2008, entitled “MICROORGANISMS FOR IMAGING AND/OR TREATMENT OF TUMORS.”

[0005] This application is related to U.S. application Ser. No. 10/872,156, filed on Jun. 18, 2004, entitled “MICROORGANISMS FOR THERAPY,” which claims the benefit of priority under 35 U.S.C. §119(a) to each of EP Application No. 03 013 826.7, filed 18 Jun. 2003, entitled “Recombinant vaccinia viruses useful as tumor-specific delivery vehicle for cancer gene therapy and vaccination,” EP Application No. 03 018 478.2, filed 14 Aug. 2003, entitled “Method for the production of a polypeptide, RNA or other compound in tumor tissue,” and EP Application No. 03 024 283.8, filed 22 Oct. 2003, entitled “Use of a Microorganism or Cell to Induce Autoimmunization of an Organism Against a Tumor.” This application also is related to International Application No. PCT/US04/19866, filed on Jun. 18, 2004, entitled “MICROORGANISMS FOR THERAPY.”

[0006] This application also is related to U.S. application Ser. No. 10/866,606, filed Jun. 10, 2004, entitled “LIGHT EMITTING MICROORGANISMS AND CELLS FOR DIAGNOSIS AND THERAPY OF TUMORS,” which is a continuation of U.S. application Ser. No. 10/189,918, filed Jul. 3, 2002, entitled “LIGHT EMITTING MICROORGANISMS AND CELLS FOR DIAGNOSIS AND THERAPY OF TUMORS.” This application also is related to International PCT Application PCT/IB02/04767, filed Jul. 31, 2002, entitled “MICROORGANISMS AND CELLS FOR DIAGNOSIS AND THERAPY OF TUMORS,” EP Application No. 01 118 417.3, filed Jul. 31, 2001, entitled “Light-emitting microorganisms and cells for tumor diagnosis/therapy,” EP Application No. 01 125 911.6, filed Oct. 30, 2001, entitled “LIGHT EMITTING MICROORGANISMS AND CELLS FOR DIAGNOSIS AND THERAPY OF TUMORS” and EP Application No. 02 0794 632.6, filed Jan. 28, 2004, entitled “Microorganisms and Cells for Diagnosis and Therapy of Tumors.”

[0007] Where permitted, the subject matter of each of the above applications is incorporated by reference in its entirety.

### FIELD OF INVENTION

[0008] Methods for using cellular compositions in combination with oncolytic viruses are provided. Methods for using cellular compositions in combination with oncolytic viruses for the inhibition and treatment of tumors are provided. Diagnostic and therapeutic methods also are provided.

### BACKGROUND

[0009] Cell compositions that are administered to a subject in cell therapy protocols have the potential to result in the formation of a tumor, insofar as the cell composition can contain neoplastic cells or neoplastic progenitor cells. For example, cell therapies, such as administration of stem cells, have been associated with formation of malignant cancers in subjects receiving stem cell therapies. While the potential of cellular therapy in the treatment of diseases, disorders and injury is significant, the formation of tumors, such as teratomas, as a result of such treatment is an unacceptable outcome. Accordingly, there exists a need for methods of safely administering cellular compositions that reduces the risk of tumor formation in subjects receiving cellular therapy.

### SUMMARY

[0010] Provided herein are methods for inhibiting the development of a tumor or inhibiting tumor cells in a subject receiving a cell therapy, where the method involves administering a cellular composition to a subject in combination with an oncolytic virus to the subject. In such methods, the oncolytic virus is selected from those that infect neoplastic cells of the cellular composition. The cellular composition can contain cells, such as, but not limited to, stem cells, bone marrow cells, immune cells, or cells comprising a gene therapy vector. In some examples, the tumor that is inhibited is a teratoma.

[0011] In examples where the cells for the cellular therapy are immune cells, the cells can be T lymphocytes, antigen presenting cells or natural killer cells. T lymphocytes include, for example, tumor-infiltrating lymphocytes (TIL) or cytotoxic lymphocytes (CTL). The TIL can be harvested from a subject and treated with an immunostimulatory agent, such as interleukin-2.

[0012] In some examples, the oncolytic virus and the cellular composition are administered simultaneously, sequentially or intermittently. In some examples, the cellular composition is administered in a single administration or multiple administrations. In some examples, the cellular composition is administered locally or systemically. For example, the cellular composition can be administered to the subject intravenously, intraarterially, intratumorally, endoscopically, intralesionally, intramuscularly, intradermally, intraperitoneally, intravesicularly, intraarticularly, intrapleurally, percutaneously, subcutaneously, orally, parenterally, intranasally, intratracheally, by inhalation, intracranially, intraprostaticaly, intravitreally, ocularly, vaginally, intracoronary, intramyocardially, transendocardially, trans-epicardially, intraspinally, intra-striatumly, transdermally, rectally or sub-epidermally. In particular examples, the cellular composition is administered by injection at a site of tissue or cell damage.

[0013] In some examples, the oncolytic virus is administered in a single administration or multiple administrations. In some examples, the oncolytic virus is administered locally or systemically. For example, the virus can be administered intravenously, intraarterially, intratumorally, endoscopically, intralesionally, intramuscularly, intradermally, intraperitoneally, intravesicularly, intraarticularly, intrapleurally, percutaneously, subcutaneously, orally, parenterally, intranasally, intratracheally, by inhalation, intracranially, intraprostaticaly, intravitreally, topically, ocularly, vaginally, or rectally.

[0014] Provided herein are methods for removing neoplastic cells or neoplastic progenitors from a cellular composition, comprising contacting a cellular composition with a virus that infects and kills neoplastic ells, wherein the virus is an LIVP virus. Also, provided herein are methods for inhibiting the formation of a tumor in a subject receiving a cellular therapy, where the method involves contacting a cellular composition with a virus that infects and kills neoplastic cells and subsequently administering the treated cellular composition to a subject for therapy. In some examples, the cellular composition can be contacted with the virus, for example, for 1, 2, 3, 4, 5, 6, 7, 8, 9, 10, 11, 12, 18, 24, 30, 36, 42, 48, or 72 hours. In some examples, the cellular composition is contacted with the virus at multiplicity of infection of about or 0.001, 0.01, 0.1, 1, 10, or 100. In exemplary methods, the cellular composition can contain cells, such as, but not limited to, stem cells, bone marrow cells, immune cells, or cells comprising a gene therapy vector. In some examples where the cells for the cellular therapy are immune cells, the cells can be T lymphocytes, antigen presenting cells or natural killer cells. T lymphocytes include, for example, tumor-infiltrating lymphocytes (TIL) or cytotoxic lymphocytes (CTL). The TIL can be harvested from a subject and treated with an immunostimulatory agent, such as interleukin-2.

[0015] In some examples of the methods provided, the cellular therapy is administered for treatment of a disease or disorder, such as, but not limited to, cardiovascular disease, cancer, diabetes, spinal cord injury, neurodegenerative disease, Alzheimer's disease, Parkinson's disease, multiple sclerosis, Amyotrophic lateral sclerosis, Duchenne Muscular Dystrophy, muscle damage or dystrophy, stroke, burns, lung disease, retinal disease, kidney disease, osteoarthritis, and rheumatoid arthritis.

[0016] In some examples, the cellular composition for use in the methods provided is a stem cell composition. For example, the stem cell composition can contain embryonic stem cells, germinal stem cells, or adult stem cells. In some examples, the stem cells are mammalian embryonic stem cells. In some examples, the embryonic stem cells are human embryonic stem cells. In other examples, the embryonic stem cells are non-human stem cells, such as, for example, mouse, rat or non-human primate embryonic stem cells. In some examples, the embryonic stem cell composition for use in the methods provided contain ACT-14, AS034, AS034.1, AS034.2, AS038, AS079, AS094, BG01, BG02, BG03, BG04, CH01, CH02, CLS1, CLS2, CLS3, CLS4, ES01, ES02, ES03, ES04, ES05, ES06, ESM01, ESM02, ESM03, FC018, FES 21, FES 22, FES 29, FES 30, GE01, GE07, GE09, GE13, GE14, GE91, GE92, hES-NCL1, HS181, HS207, HUES1, HUES10, HUES11, HUES12, HUES13, HUES14, HUES15, HUES16, HUES17, HUES2, HUES3, HUES4, HUES5, HUES6, HUES7, HUES8, HUES9, KhES-1, KhES-2, KhES-3, MB01, MB02, MB03, Miz-hES1, Miz-hES10, Miz-hES11, Miz-hES12, Miz-hES13, Miz-hES14, Miz-hES15, Miz-hES2, Miz-hES3, Miz-hES4, Miz-hES5, Miz-hES6, Miz-hES7, Miz-hES8, NC01, NC02, NC03, ReliCellhES1, RH1, RH3, RH4, RH5, RH6, RH7, RL05, RL07, RL10, RL13, RL15, RL20, RL21, Royan H1, SA001, SA002, SA002.5, SA046, SA085, SA111, SA121, SA142, SA167, SA181, SA191, SA196, SA202, SA203, SA211, SA218, SA240, SA279, SA348, SA352, SA399, SA611, SI-100, SI-101, SI-102, SI-103, SI-104, SI-105, SI-106, SI-107, SI-108, SI-109, SI-110, SI-111, SI-114, SI-115, SI-122, SI-123, SI-124, SI-125, SI-126, SI-128, SI-130, SI-131, SI-132, SI-133, SI-134, SI-135, SI-137, SI-138, SI-139, SI-140, SI-141, SI-144, SI-145, SI-146, SI-148, SI-149, SI-15, SI-150, SI-151, SI-153, SI-154, SI-155, SI-156, SI-157, SI-158, SI-159, SI-160, SI-161, SI-162, SI-163, SI-164, SI-165, SI-167, SI-168, SI-169, SI-170, SI-171, SI-172, SI-174, SI-175, SI-176, SI-177, SI-178, SI-179, SI-18, SI-180, SI-182, SI-183, SI-184, SI-185, SI-186, SI-187, SI-188, SI-189, SI-191, SI-192, SI-193, SI-194, SI-195, SI-196, SI-197, SI-198, SI-199, SI-200, SI-201, SI-202, SI-203, SI-204, SI-205, SI-206, SI-208, SI-209, SI-21, SI-210, SI-211, SI-213, SI-214, SI-215, SI-216, SI-217, SI-221, SI-24, SI-27, SI-28, SI-31, SI-33, SI-53, SI-60, SI-62, SI-63, SI-79, SI-80, SI-81, SI-93, SI-94, SI-95, SI-96, SI-97, SI-98, SI-99, SNUhES1, SNUhES2, SNUhES3, TE-03, TE-04, TE-06, TE-07, TE-32, TE-33, TE-62, TE-72, UC01, UC06, VAL-1, VAL-2, VAL-3, VAL-4, WA01, WA07, WA09, WA13 or WA14 cells.

[0017] In some examples where the stem cell composition is an adult stem cell composition, the composition can contain hematopoietic stem cells, mesenchymal stem cells, or multipotent adult progenitor cells. In some examples, the hematopoietic stem cells are harvested from bone marrow or blood.

[0018] In some examples, the stem cells in the stem cell compositions have been partially differentiated in vitro prior to administration to the subject or prior to contact with the virus. For example, the stem cells can be differentiated in vitro for 1, 2, 3, 4, 5, 6, 7, 8, 9, 10, 11, 12, 13, 14, 15, 16, 17, 18, 19, 20, 25 or 30 days.

[0019] In any of the exemplary methods provided, the virus can be a vaccinia virus. For example, the virus can be a Lister strain virus, such as, for example, LIVP. In some examples, virus is selected from among GLV-1h68, GLV-1i69, GLV-1h70, GLV-1h71, GLV-1h72, GLV-1h73, GLV-1h74, GLV-1h81, GLV-1h82, GLV-1h83, GLV-1h84, GLV-1h85, GLV-1h86, GLV-1j87, GLV-1j88, GLV-1j89, GLV-1h90, GLV-1h91, GLV-1h92, GLV-1h96, GLV-1h97, GLV-1h98, GLV-1h100, GLV-1h101, GLV-1h139, GLV-1h104, GLV-1h105, GLV-1h106, GLV-1h107, GLV-1h108, GLV-1h109, GLV-1h146, GLV-1h150, GLV-1h151, GLV-1h152 and GLV-1h153.

[0020] In some examples of the methods where the virus is administered directly to a subject, the amount of virus administered is 1×10⁵ or about 1×10⁵ plaque forming units (PFU), 5×10⁵ or about 5×10⁵ PFU, at least 1×10⁶ or about 1×10⁶ PFU, 5×10⁶ or about 5×10⁶ PFU, 1×10⁷ or about 1×10⁷ PFU, 5×10⁷ or about 5×10⁷ PFU, 1×10⁸ or about 1×10⁸ PFU, 5×10⁸ or about 5×10⁸ PFU, 1×10⁹ or about 1×10⁹ PFU, 5×10⁹ or about 5×10⁹ PFU, 1×10¹⁰ or about 1×10¹⁰ PFU or 5×10¹⁰ or about 5×10¹⁰ PFU.

[0021] Provided herein are methods for inhibiting the development of a tumor or inhibiting tumor cells in a subject receiving a cell therapy, where the method involves administering a cellular composition to a subject in combination with an oncolytic virus to the subject and detecting the virus in the subject. In some examples, the virus is detected by fluorescence imaging, magnetic resonance imaging (MRI), single-photon emission computed tomography (SPECT), positron emission tomography (PET), scintigraphy, gamma camera, a β+ detector, a γ detector or a combination of such methods. In some examples, the virus encodes a detectable protein or a protein that induces a detectable signal. For example, the detectable protein can be a luciferase or a fluorescent protein.

[0022] The virus for use in any of the methods provided can encode a therapeutic gene product. In some examples, the therapeutic gene product is an anti-cancer agent or anti-angiogenic agent. For example, the therapeutic gene product can be selected from among a cytokine, a chemokine, an immunomodulatory molecule, an antigen, an antibody or fragment thereof, antisense RNA, prodrug converting enzyme, siRNA, angiogenesis inhibitor, a toxin, an antitumor oligopeptide, a mitosis inhibitor protein, an antimitotic oligopeptide, an anti-cancer polypeptide antibiotic, a transporter protein, and tissue factor.

[0023] In methods provided herein for administering a cellular composition to a subject, the method can also include administering an anticancer agent. Exemplary anticancer agents included, but are not limited to, a cytokine, a chemokine, a growth factor, a photosensitizing agent, a toxin, an anti-cancer antibiotic, a chemotherapeutic compound, a radionuclide, an angiogenesis inhibitor, a signaling modulator, an anti-metabolite, an anti-cancer vaccine, an anti-cancer oligopeptide, a mitosis inhibitor protein, an antimitotic oligopeptide, an anti-cancer antibody, an anti-cancer antibiotic, an immunotherapeutic agent, hyperthermia or hyperthermia therapy, a bacterium, radiation therapy and a combination of such agents. In some examples, the anticancer agent is cisplatin, carboplatin, gemcitabine, irinotecan, an anti-EGFR antibody, or an anti-VEGF antibody. In some examples, the anticancer agent is administered simultaneously, sequentially, or intermittently with the virus.

[0024] In methods provided herein for administering an oncolytic virus to a subject, the method can also include administering an anti-viral agent to attenuate replication of or eliminate the virus from the subject during or following therapy. Exemplary antiviral agents, include, but are not limited to cidofovir, alkoxyalkyl esters of cidofovir, Gleevec, gancyclovir, acyclovir and ST-26.

[0025] Provided herein are uses of a virus for formulation of a medicament for preventing tumor formation in a subject receiving a cellular therapy. Also, provided herein are viruses for use in preventing tumor formation in a subject receiving a cellular therapy. In some examples, the therapy is a stem cell therapy, including, but not limited to, treatment of cardiovascular disease, cancer, diabetes, spinal cord injury, neurodegenerative disease, Alzheimer's disease, Parkinson's disease, multiple sclerosis, Amyotrophic lateral sclerosis, Duchenne Muscular Dystrophy, muscle damage or dystrophy, stroke, burns, lung disease, retinal disease, kidney disease, osteoarthritis or rheumatoid arthritis. In some examples, the virus is a vaccinia virus. For example, the virus can be a Lister strain virus, such as, for example, LIVP. In some examples, virus is selected from among GLV-1h68, GLV-1i69, GLV-1h70, GLV-1h71, GLV-1h72, GLV-1h73, GLV-1h74, GLV-1h81, GLV-1h82, GLV-1h83, GLV-1h84, GLV-1h85, GLV-1h86, GLV-1j87, GLV-1j88, GLV-1j89, GLV-1h90, GLV-1h91, GLV-1h92, GLV-1h96, GLV-1h97, GLV-1h98, GLV-1h100, GLV-1h101, GLV-1h139, GLV-1h104, GLV-1h105, GLV-1h106, GLV-1h107, GLV-1h108, GLV-1h109, GLV-1h146, GLV-1h150, GLV-1h151, GLV-1h152 and GLV-1h153. In some examples, the virus encodes a detectable protein or a protein that induces a detectable signal, such as, for example, a luciferase or a fluorescent protein. In some examples, the virus encodes a therapeutic gene product, such as, for example, an anti-cancer agent or anti-angiogenic agent. Exemplary anti-cancer agents include, but are not limited to, a cytokine, a chemokine, an immunomodulatory molecule, an antigen, an antibody or fragment thereof, antisense RNA, prodrug converting enzyme, siRNA, angiogenesis inhibitor, a toxin, an antitumor oligopeptide, a mitosis inhibitor protein, an antimitotic oligopeptide, an anti-cancer polypeptide antibiotic, a transporter protein, and tissue factor.

### DETAILED DESCRIPTION

A. Definitions
B. Overview
C. Cellular therapy

1. Bone marrow transplant
2. T cell therapy
3. Stem cell therapy

a. Stem cells

Embryonic stem cells

b. Conditions amenable to stem cell therapy
c. Stem cell-associated tumors

D. Therapeutic and Diagnostic Methods for the Treatment and

Prevention of Cell therapy-associated Tumors

1. Viruses For Use in the Methods Provided

a. Exemplary viruses

i. Poxviruses

(1) Vaccinia viruses
(2) Modification of Vaccinia Viruses
(3) Exemplary Modified Vaccinia Viruses

b. Other cytoplasmic viruses
c. Adenovirus, Herpes, Retroviruses

2. Exemplary cullular compositions
3. Methods of Treatment

a. Administration of Virus for Prevention of Tumor
Formation

i. Direct Administration of Virus

(1) Mode of administration

ii. Pre-treatment of Stem Cells for Administration
iii. Administration of virus for treatment of a stem

cell-derived tumor
b. Virus Dosages
c. Number of administrations
d. Steps prior to administration of the virus

4. Co-administrations

a. Administering a plurality of viruses
b. Therapeutic Compounds
c. Immunotherapies and biological therapies

5. Monitoring

a. Monitoring viral gene expression
b. Monitoring tumor size
c. Monitoring antibody titer
d. Monitoring general health diagnostics
e. Monitoring coordinated with treatment

E. Therapeutic and Diagnostic Methods for the Treatment and

Prevention of Tumors Associated with Other Cell Therapies

F. Pharmaceutical Compositions, Combinations and Kits

1. Pharmaceutical Compositions
2. Combinations
3. Kits

G. Examples

### A. DEFINITIONS

[0027] Unless defined otherwise, all technical and scientific terms used herein have the same meaning as is commonly understood by one of skill in the art to which the invention(s) belong. All patents, patent applications, published applications and publications, websites and other published materials referred to throughout the entire disclosure herein, unless noted otherwise, are incorporated by reference in their entirety. In the event that there are pluralities of definitions for terms herein, those in this section prevail. Where reference is made to a URL or other such identifier or address, it is understood that such identifiers can change and particular information on the internet can come and go, but equivalent information is known and can be readily accessed, such as by searching the internet and/or appropriate databases. Reference thereto evidences the availability and public dissemination of such information.

[0028] As used herein, “virus” refers to any of a large group of entities referred to as viruses, which typically contain a protein coat surrounding an RNA or DNA core of genetic material, and are capable of growth and multiplication only in living cells. Viruses for use in the methods provided herein include, but are not limited, to a poxvirus, including a vaccinia virus (e.g. a Lister strain vaccinia virus, such as LIVP). Other exemplary viruses include, but are not limited to, adenovirus, adeno-associated virus, herpes simplex virus, Newcastle disease virus, vesicular stomatitis virus, mumps virus, influenza virus, measles virus, reovirus, human immunodeficiency virus (HIV), hanta virus, myxoma virus, cytomegalovirus (CMV), lentivirus, Sindbis virus, and any plant or insect virus.

[0029] As used herein, an “oncolytic virus” is a replication competent virus that preferentially replicates in, and kills, neoplastic or cancer cells. The virus can be a naturally-occurring virus or an engineered virus. In some examples provide herein, the oncolytic virus is a modified vaccinia virus.

[0030] As used herein, “neoplastic cells” refer to cells which exhibit relatively autonomous growth, so that they exhibit an aberrant growth phenotype characterized by a significant loss of control of cell proliferation. Neoplastic cells comprise cells which may be actively replicating or in a temporary non-replicative resting state (G 1 or G 0); similarly, neoplastic cells may comprise cells which have a well-differentiated phenotype, a poorly-differentiated phenotype, or a mixture of both type of cells. Thus, not all neoplastic cells are necessarily replicating cells at a given timepoint. Neoplastic cells encompasses such cells in benign neoplasms and cells in malignant neoplasms. Malignant neoplastic cells are frequently referred to as cancer, typically termed carcinoma if originating from cells of endodermal or ectodermal histological origin, or sarcoma if originating from cell types derived from mesoderm.

[0031] As used herein, “neoplastic progenitor cells” refers to cells of a cellular composition that possess the ability to become neoplastic.

[0032] As used herein, the term “neoplasm” or “neoplasia” refers to abnormal new cell growth, and thus means the same as tumor, which can be benign or malignant. Unlike hyperplasia, neoplastic proliferation persists even in the absence of the original stimulus.

[0033] As used herein, a “stem cell-derived tumor” is any tumor that originates from cells or progeny cells of an exogenous stem cell composition that is administered to a subject. The stem cell-derived tumor can be benign or malignant.

[0034] As used herein, a “cellular composition” or “cell composition” is any composition that contains cells. The cell composition may be a mixed cellular composition with two or more types of cells. The cell compositions described herein typically contain normal and neoplastic cells. As described herein, oncolytic viruses can be administered to eliminate neoplastic cells from a cellular composition in vivo or in vitro.

[0035] As used herein, a “stem cell composition” is any cellular composition containing a population of cells, some of which are stem cells. The composition also can contain cells that are not stem cells or non-cellular matter, such as for example, hormones, peptides or other extracellular material.

[0036] As used herein, a “stem cell” is any totipotent, pluripotent or multipotent cell that has the ability to differentiate into multiple different types of cells (e.g., terminally differentiated cells). For example, stem cells include those that can differentiate into any of the three main germ layers: endoderm, ectoderm, and mesoderm. Stem cells include any type of stem cell, such as embryonic stem cells, post natal stem cells (e.g. from the umbilical cord and placenta) adult stem cells, fetal stem cells or artificially engineered stem cells.

[0037] As used herein, “embryonic stem cells” are stem cells obtained from an embryo that is typically six weeks old or less. Totipotent human embryonic stem cells (hESC) generally can be obtained from embryos that are 5 to 7 days old. Pluripotent human primordial germ cells (hEG) typically can be obtained from embryos that are six weeks old or less.

[0038] As use herein, “fetal stem cells” refer to any stem cell that is obtained prenatally from a fetus that is typically greater that 6 weeks old. Both pluripotent and multipotent human stem cells (hSC) are typically.

[0039] As used herein, “adult stem cells” refers to any stem cell that is obtained from a post-natal subject. Typically, the subject is a full grown adult. Exemplary adult stem include, but are not limited to cells harvested from organs such as fat, muscle or bone marrow.

[0040] As used herein, an “exogenous stem cell composition” is any stem cell composition that is administered to a subject for stem cell therapy. The exogenous stem cell composition can contain stem cells harvested from the subject or can contain stem cell obtained from other sources, such as for example, embryonic stem cells or adult stem cells from another donor.

[0041] As used herein, the term “exogenous” is used interchangeably with the term “heterologous” refer to a substance coming from some source other than its native source. For example, the terms “exogenous protein,” or “exogenous cell” refer to a protein or cell from a non-native source or location, and that have been artificially supplied to a biological system. In contrast, the terms “endogenous protein,” or “endogenous cell” refer to a protein or cell that are native to the biological system, species or individual.

[0042] As used herein, “inhibition of the formation of a tumor” or “inhibition of the development of a tumor” includes prevention of tumor development or formation, or lessoning in the risk of development of a tumor in a subject as the result of administering cellular therapy or, in the event a tumor has formed as a result of the therapy, it refers to treatment of the tumor, including eradication thereof.

[0043] As used herein, “stem cell therapy” refers to any use of a stem cell composition to treat a disease or disorder.

[0044] As used herein, the phrase “contacting a stem cell composition with a virus” refers to the addition of a virus to a stem cell culture in order to infect cells of the stem cell culture with the virus.

[0045] As used herein, a “pretreated stem cell composition” is a stem cell composition that has been infected with an oncolytic virus for a predetermined period of time.

[0046] As used herein, neoplastic disease refers to any disorder involving cancer, including tumor development, growth, metastasis and progression.

[0047] As used herein, the term “viral vector” is used according to its art-recognized meaning. It refers to a nucleic acid vector construct that includes at least one element of viral origin and can be packaged into a viral vector particle. The viral vector particles can be used for the purpose of transferring DNA, RNA or other nucleic acids into cells either in vitro or in vivo. Viral vectors include, but are not limited to, retroviral vectors, vaccinia vectors, lentiviral vectors, herpes virus vectors (e.g., HSV), baculoviral vectors, cytomegalovirus (CMV) vectors, papillomavirus vectors, simian virus (SV40) vectors, semliki forest virus vectors, phage vectors, adenoviral vectors, and adeno-associated viral (AAV) vectors.

[0048] As used herein, the term “modified” with reference to a gene refers to a deleted gene, a gene encoding a gene product having one or more truncations, mutations, insertions or deletions, or a gene that is inserted (into the chromosome or on a plasmid, phagemid, cosmid, and phage) encoding a gene product, typically accompanied by at least a change in function of the modified gene product or virus.

[0049] As used herein, the term “modified virus” refers to a virus that is altered with respect to a parental strain of the virus. Typically modified viruses have one or more truncations, mutations, insertions or deletions in the genome of virus. A modified virus can have one or more endogenous viral genes modified and/or one or more intergenic regions modified. Exemplary modified viruses can have one or more heterologous nucleic acid sequences inserted into the genome of the virus. Modified viruses can contain one more heterologous nucleic acid sequences in the form of a gene expression cassette for the expression of a heterologous gene. As used herein, modification of a heterologous nucleic acid molecule with respect to a virus containing a heterologous nucleic acid molecule refers to any alteration of the heterologous nucleic acid molecule including truncations, mutations, insertions, or deletions of the nucleic acid molecule. Modification of a heterologous nucleic acid molecule can also include alteration of the viral genome, which can be, for example, a deletion of all or a portion heterologous nucleic from the viral genome or insertion of an additional heterologous nucleic acid molecule into the viral genome.

[0050] As used herein, the term “therapeutic virus” refers to a virus that is administered for the treatment of a disease or disorder. A therapeutic virus is typically a modified virus. Such modifications include one or more insertions, deletions, or mutations in the genome of the virus. Therapeutic viruses typically possess modifications in one or more endogenous viral genes or one or more intergenic regions, which attenuate the toxicity of the virus, and can optionally express a heterologous therapeutic gene product and/or detectable protein. Therapeutic viruses can contain heterologous nucleic acid molecules, including one or more gene expression cassettes for the expression of the therapeutic gene product and/or detectable protein. Therapeutic viruses can be replication competent viruses (e.g., oncolytic viruses) including conditional replicating viruses, or replication-defective viruses. As used herein, the term, “therapeutic gene product” refers to any heterologous protein expressed by the therapeutic virus that ameliorates the symptoms of a disease or disorder or ameliorates the disease or disorder.

[0051] As used herein, attenuation of a virus means to a reduction or elimination of deleterious or toxic effects to a host upon administration of the virus compared to an un-attenuated virus. As used herein, a virus with low toxicity means that upon administration a virus does not accumulate in organs and tissues in the host to an extent that results in damage or harm to organs, or that impacts survival of the host to a greater extent than the disease being treated does. For the purposes herein, attenuation of toxicity is used interchangeably with attenuation of virulence and attenuation of pathogenicity.

[0052] As used herein, the term “viral load” is the amount of virus present in the blood of a patient. Viral load is also referred to as viral titer or viremia. Viral load can be measured in variety of standard ways, including immunochemistry methods or by plaque assay.

[0053] As used herein, the term “toxicity” with reference to a virus refers to the ability of the virus to cause harm to the subject to which the virus has been administered.

[0054] As used herein virulence and pathogenicity with reference to a virus refers to the ability of the virus to cause disease or harm in the subject to which the virus has been administered. Hence, for the purposes herein the terms toxicity, virulence, and pathogenicity with reference to a virus are used interchangeably.

[0055] As used herein, a disease or disorder refers to a pathological condition in an organism resulting from, for example, infection or genetic defect, and characterized by identifiable symptoms.

[0056] As used herein, treatment means any manner in which the symptoms of a condition, disorder or disease are ameliorated or otherwise beneficially altered. Treatment also encompasses any pharmaceutical use of the viruses described and provided herein.

[0057] As used herein, amelioration or alleviation of symptoms associated with a disease refers to any lessening, whether permanent or temporary, lasting or transient of symptoms that can be attributed to or associated with a disease. Similarly, amelioration or alleviation of symptoms associated with administration of a virus refers to any lessening, whether permanent or temporary, lasting or transient of symptoms that can be attributed to or associated with an administration of the virus for treatment of a disease.

[0058] As used herein, an effective amount of a virus or compound for treating a particular disease is an amount that is sufficient to ameliorate, or in some manner reduce the symptoms associated with the disease. Such an amount can be administered as a single dosage or can be administered according to a regimen, whereby it is effective. The amount can cure the disease but, typically, is administered in order to ameliorate the symptoms of the disease. Repeated administration can be required to achieve the desired amelioration of symptoms.

[0059] As used herein, an effective amount of a therapeutic agent for control of viral titer in a patient is an amount that is sufficient to prevent a virus introduced to a patient for treatment of a disease from overwhelming the patient's immune system such that the patient suffers adverse side effects due to virus toxicity or pathogenicity. Such side effects can include, but are not limited to fever, abdominal pain, aches or pains in muscles, cough, diarrhea, or general feeling of discomfort or illness that are associated with virus toxicity and are related to the subject's immune and inflammatory responses to the virus. Side effects or symptoms can also include escalation of symptoms due to a systemic inflammatory response to the virus, such as, but not limited to, jaundice, blood-clotting disorders and multiple-organ system failure. Such an amount can be administered as a single dosage or can be administered according to a regimen, whereby it is effective. The amount can prevent the appearance of side effects but, typically, is administered in order to ameliorate the symptoms of the side effects associated with the virus and virus toxicity. Repeated administration can be required to achieve the desired amelioration of symptoms.

[0060] As used herein, an in vivo method refers to a method performed within the living body of a subject.

[0061] As used herein, a subject includes any animal for whom diagnosis, screening, monitoring or treatment is contemplated. Animals include mammals such as primates and domesticated animals. An exemplary primate is human. A patient refers to a subject such as a mammal, primate, human, or livestock subject afflicted with a disease condition or for which a disease condition is to be determined or risk of a disease condition is to be determined.

[0062] As used herein, cancer is a term for diseases caused by or characterized by any type of malignant tumor, including metastatic cancers, lymphatic tumors, and blood cancers. Exemplary cancers include, but are not limited to: leukemia, lymphoma, pancreatic cancer, lung cancer, ovarian cancer, breast cancer, cervical cancer, bladder cancer, prostate cancer, glioma tumors, adenocarcinomas, liver cancer and skin cancer. Exemplary cancers in humans include a bladder tumor, breast tumor, prostate tumor, basal cell carcinoma, biliary tract cancer, bladder cancer, bone cancer, brain and CNS cancer (e.g., glioma tumor), cervical cancer, choriocarcinoma, colon and rectum cancer, connective tissue cancer, cancer of the digestive system; endometrial cancer, esophageal cancer; eye cancer; cancer of the head and neck; gastric cancer; intra-epithelial neoplasm; kidney cancer; larynx cancer; leukemia; liver cancer; lung cancer (e.g. small cell and non-small cell); lymphoma including Hodgkin's and Non-Hodgkin's lymphoma; melanoma; myeloma, neuroblastoma, oral cavity cancer (e.g., lip, tongue, mouth, and pharynx); ovarian cancer; pancreatic cancer, retinoblastoma; rhabdomyosarcoma; rectal cancer, renal cancer, cancer of the respiratory system; sarcoma, skin cancer; stomach cancer, testicular cancer, thyroid cancer; uterine cancer, cancer of the urinary system, as well as other carcinomas and sarcomas.

[0063] As used herein, the term “malignant,” as it applies to tumors, refers to primary tumors that have the capacity of metastasis with loss of growth control and positional control.

[0064] As used herein, metastasis refers to a growth of abnormal or neoplastic cells distant from the site primarily involved by the morbid process.

[0065] As used herein, proliferative disorders include any disorders involving abnormal proliferation of cells, such as, but not limited to, neoplastic diseases. As used herein, a method for treating or preventing neoplastic disease means that any of the symptoms, such as the tumor, metastasis thereof, the vascularization of the tumors or other parameters by which the disease is characterized are reduced, ameliorated, prevented, placed in a state of remission, or maintained in a state of remission. It also means that the indications of neoplastic disease and metastasis can be eliminated, reduced or prevented by the treatment. Non-limiting examples of the indications include uncontrolled degradation of the basement membrane and proximal extracellular matrix, migration, division, and organization of the endothelial cells into new functioning capillaries, and the persistence of such functioning capillaries.

[0066] As used herein, a prodrug is a compound that, upon in vivo administration, is metabolized or otherwise converted to the biologically, pharmaceutically or therapeutically active form of the compound. To produce a prodrug, the pharmaceutically active compound is modified such that the active compound is regenerated by metabolic processes. The prodrug can be designed to alter the metabolic stability or the transport characteristics of a drug, to mask side effects or toxicity, to improve the flavor of a drug or to alter other characteristics or properties of a drug. By virtue of knowledge of pharmacodynamic processes and drug metabolism in vivo, those of skill in this art, once a pharmaceutically active compound is known, can design prodrugs of the compound (see, e.g., Nogrady (1985) Medicinal Chemistry A Biochemical Approach, Oxford University Press, New York, pages 388-392).

[0067] As used herein, an anti-cancer agent or compound (used interchangeably with “anti-tumor or anti-neoplastic agent”) refers to any agents, or compounds, used in anti-cancer treatment. These include any agents, when used alone or in combination with other compounds, that can alleviate, reduce, ameliorate, prevent, or place or maintain in a state of remission of clinical symptoms or diagnostic markers associated with neoplastic disease, tumors and cancer, and can be used in methods, combinations and compositions provided herein. Exemplary anti-cancer agent agents include, but are not limited to, the viruses provided herein used singly or in combination and/or in combination with other anti-cancer agents, such as cytokines, growth factors, hormones, photosensitizing agents, radionuclides, toxins, anti-metabolites, signaling modulators, anti-cancer antibiotics, anti-cancer antibodies, anti-cancer oligopeptides, angiogenesis inhibitors, radiation therapy, hypothermia therapy, hyperthermia therapy, laser therapy, chemotherapeutic compounds, or a combination thereof.

[0068] Chemotherapeutic compounds include, but are not limited to platinum; platinum analogs anthracenediones; vinblastine; alkylating agents; alkyl sulfonates; aziridines; ethylenimines and methylamelamines; nitrosureas; antibiotics; anti-metabolites; folic acid analogues; androgens; anti-adrenals; folic acid replenisher; aminolevulinic acid; amsacrine; bestrabucil; bisantrene; edatraxate; defofamine; demecolcine; diaziquone; elformithine; elliptinium acetate; etoglucid; gallium nitrate; substituted ureas; hydroxyurea; lentinan; lonidamine; mitoguazone; mitoxantrone; mopidamol; nitracrine; pentostatin; phenamet; pirarubicin; podophyllinic acid; 2-ethylhydrazide; procarbazine; anti-cancer polysaccharides; polysaccharide-K; razoxane; sizofiran; spirogermanium; tenuazonic acid; triaziquone; 2,2′,2″-trichlorotriethylamine; urethan; vindesine; dacarbazine; mannomustine; mitobronitol; mitolactol; pipobroman; gacytosine; cytosine arabinoside; cyclophosphamide; thiotepa; taxoids, such as paclitaxel and doxetaxel; chlorambucil; gemcitabine; 6-thioguanine; mercaptopurine; methotrexate; etoposide (VP-16); ifosfamide; mitomycin C; vincristine; vinorelbine; navelbine; novantrone; teniposide; daunomycin; aminopterin; xeloda; ibandronate; CPT11; topoisomerase inhibitor RFS 2000; difluoromethylornithine (DMFO); retinoic acid; esperamicins; capecitabine; methylhydrazine derivatives; and pharmaceutically acceptable salts, acids or derivatives of any of the above. Chemotherapeutic compounds also include, but are not limited to, adriamycin, non-sugar containing chloroethylnitrosoureas, 5-fluorouracil, bleomycin, doxorubicin, taxol, fragyline, Meglamine GLA, valrubicin, carmustaine and poliferposan, MM1270, BAY 12-9566, RAS farnesyl transferase inhibitor, farnesyl transferase inhibitor, MMP, MTA/LY231514, LY264618/Lometexol, Glamolec, CI-994, TNP-470, Hycamtin/Topotecan, PKC412, Valspodar/PSC833, Novantrone/Mitroxantrone, Metaret/Suramin, Batimastat, E7070, BCH-4556, CS-682, 9-AC, AG3340, AG3433, Incel/VX-710, VX-853, ZD0101, IS1641, ODN 698, TA 2516/Marmistat, BB2516/Marmistat, CDP 845, D2163, PD183805, DX8951f, Lemonal DP 2202, FK 317, Picibanil/OK-432, AD 32/Valrubicin, Metastron/strontium derivative, Temodal/Temozolomide, Evacet/liposomal doxorubicin, Yewtaxan/Placlitaxel, Taxol®/Paclitaxel, Xeload/Capecitabine, Furtulon/Doxifluridine, Cyclopax/oral paclitaxel, Oral Taxoid, SPU-077/Cisplatin, HMR 1275/Flavopiridol, CP-358 (774)/EGFR, CP-609 (754)/RAS oncogene inhibitor, BMS-182751/oral platinum, UFT(Tegafur/Uracil), Ergamisol/Levamisole, Eniluracil/776C85/5FU enhancer, Campto/Levamisole, Camptosar/Irinotecan, Tumodex/Ralitrexed, Leustatin/Cladribine, Paxex/Paclitaxel, Doxil/liposomal doxorubicin, Caelyx/liposomal doxorubicin, Fludara/Fludarabine, Pharmarubicin/Epirubicin, DepoCyt, ZD1839, LU 79553/Bis-Naphtalimide, LU 103793/Dolastain, Caetyx/liposomal doxorubicin, Gemzar/Gemcitabine, ZD 0473/Anormed, YM 116, Iodine seeds, CDK4 and CDK2 inhibitors, PARP inhibitors, D4809/Dexifosamide, Ifes/Mesnex/Ifosamide, Vumon®/Teniposide, Paraplatin/Carboplatin, Plantinol/cisplatin, Vepeside/Etoposide, ZD 9331, Taxotere/Docetaxel, prodrug of guanine arabinoside, Taxane Analog, nitrosoureas, alkylating agents such as melphelan and cyclophosphamide, Aminoglutethimide, Anastrozole, Asparaginase, Busulfan, Carboplatin, Chlorombucil, Cladribine, Cytarabine HCl, Dactinomycin, Daunorubicin HCl, Denileukin diftitox, Estramustine phosphate sodium, Etoposide (VP16-213), Exemestane, Floxuridine, Fluorouracil (5-FU®), Flutamide, Hydroxyurea (hydroxycarbamide), Ifosfamide, Interferon Alfa-2a, Interferon Alfa-2b, Interferon Gamma-1b, Letrozole, Leuprolide acetate (LHRH-releasing factor analogue), Lomustine (CCNU), Mechlorethamine HCl (nitrogen mustard), Megestrol, Mercaptopurine, Mesna, Mitotane (o.p′-DDD), Mitoxantrone HCl, Octreotide, Pegaspargase, Plicamycin, Procarbazine HCl, Streptozocin, Tamoxifen citrate, Thioguanine, Thiotepa, Tretinoin, Vinblastine sulfate, Amsacrine (m-AMSA), Azacitidine, Erythropoietin, Hexamethylmelamine (HMM), Interleukin 2, Mitoguazone (methyl-GAG; methyl glyoxal bis-guanylhydrazone; MGBG), Pentostatin (2′deoxycoformycin), Semustine (methyl-CCNU), Teniposide (VM-26®), Vindesine sulfate, Altretamine, Carmustine, Estramustine, Gemtuzumab ozogamicin, Idarubicin, Ifosphamide, Isotretinoin, Leuprolide, Melphalan, Testolactone, Uracil mustard, and the like. Also included in this definition are anti-hormonal agents that act to regulate or inhibit hormone action on tumors such as anti-estrogens, adrenocortical suppressants, antiandrogens and pharmaceutically acceptable salts, acids or derivatives of any of the above. Such chemotherapeutic compounds that can be used herein include compounds whose toxicities preclude use of the compound in general systemic chemotherapeutic methods.

[0069] As used herein the term assessing or determining is intended to include quantitative and qualitative determination in the sense of obtaining an absolute value for the activity of a product, and also of obtaining an index, ratio, percentage, visual or other value indicative of the level of the activity. Assessment can be direct or indirect. As used herein, activity refers to the in vivo activities of a compound or viruses on physiological responses that result following in vivo administration thereof (or of a composition or other mixture). Activity, thus, encompasses resulting therapeutic effects and pharmaceutical activity of such compounds, compositions and mixtures. Activities can be observed in in vitro and/or in vivo systems designed to test or use such activities.

[0070] As used herein, a vaccine refers to a composition which, upon administration to a subject, elicits an immune response in a subject to which it is administered and which protects the immunized subject against subsequent challenge by the immunizing agent or an immunologically cross-reactive agent. A vaccine can be used to enhance the immune response against a pathogen, such as a virus, that expresses the immunological agent and/or has already infected the subject. Protection can be complete or partial (i.e., a reduction in symptoms or infection as compared with an unvaccinated subject). Typically a vaccine is administered to a subject that is a mammal. An immunologically cross-reactive agent can be, for example, the whole protein (e.g., tumor antigen) from which a subunit peptide used as the immunogen is derived. Alternatively, an immunologically cross-reactive agent can be a different protein which is recognized in whole or in part by the antibodies elicited by the immunizing agent. Exemplary vaccines can be modified vaccinia viruses that express an immunologically cross-reactive agent.

[0071] As used herein, the phrase “immunoprivileged cells and tissues” refers to cells and tissues, such as solid tumors and wounded tissues, which are sequestered from the immune system.

[0072] As used herein, nanoparticle refers to a microscopic particle whose size is measured in nanometers. Often such particles in nanoscale are used in biomedical applications acting as drug carriers or imaging agents. Nanoparticles can be conjugated to other agents, including, but not limited to detectable/diagnostic agents or therapeutic agents.

[0073] As used herein, “a combination” refers to any association between two or among more items. Such combinations can be packaged as kits.

[0074] As used herein, a composition refers to any mixture. It can be a solution, a suspension, an emulsion, liquid, powder, a paste, aqueous, non-aqueous or any combination of such ingredients.

[0075] As used herein, fluid refers to any composition that can flow. Fluids thus encompass compositions that are in the form of semi-solids, pastes, solutions, aqueous mixtures, gels, lotions, creams and other such compositions.

[0076] As used herein, a kit is a packaged combination, optionally, including instructions for use of the combination and/or other reactions and components for such use.

### B. OVERVIEW

[0077] Cell compositions that are administered to a subject in cell therapy protocols have the potential to result in the formation a tumor, insofar as the cell composition can contain neoplastic cells or neoplastic progenitor cells. While the potential of cellular therapy in the treatment of diseases, disorders and injury is significant, the formation of tumors, such as teratomas, as a result of such treatment is an unacceptable outcome. Thus, provided herein are methods for administering cell compositions in cell therapy protocols, wherein development of cell therapy-associated tumors is inhibited. Such methods include the administration of an oncolytic virus before, with or after administration of the cell compositions, as described in detail below. The oncolytic virus also can be mixed with the cell composition prior to administration to the subject, to remove any neoplastic cells in the composition. Additionally, these oncolytic viruses also can be used in the treatment of existing cancers in a subject.

[0078] The cell compositions administered in the methods herein include any cell composition containing one or more types of cells. The cells contained in the cell compositions include, but are not limited to, stem cells (such as embryonic stem cells and adult stem cells), immune cells and non-immune cells. Exemplary immune cells that can be included in cell compositions for cell therapy are T lymphocytes (including Th1 cells, Th2 cells, tumor infusing lymphocytes (TIL) and cytotoxic T cells (CTL)) antigen presenting cells (APC) (including dendritic cells (DC) and macrophages, and natural killer (NK) cells). Non-immune cells include, but are not limited to, neuronal, skin, adrenal, keratinocyte, blood, endothelial, kidney, bone, muscle, heart, retinal, pancreas and liver cells. Typically, 1×10⁵, 1×10⁶, 2×10⁶, 3×10⁶, 4×10⁶, 5×10⁶, 1×10⁷, 2×10⁷, 3×10⁷, 4×10⁷, 5×10⁷, 6×10⁷, 7×10⁷, 8×10⁷, 9×10⁷, 1×10⁸, 5×10⁸, 1×10⁹, or 5×10⁹ cells or more are administered.

### C. CELLULAR THERAPY

[0079] Cell or cellular therapy is the process of administering a cell composition to a subject in order to treat a disease, disorder or injury. The therapy can include the transplantation of cell compositions containing autologous or allogenic cells, differentiated or undifferentiated cells, pure populations or mixed, genetically modified or unmodified cells, or any combination thereof. Additionally, the cell therapy can include other agents and factors, such as chemotherapeutic agents, chemokines, cytokines and growth factors.

[0080] Cellular therapies include cellular immunotherapies. The immune system is designed to eradicate a large number of pathogens, as well as tumors, with minimal immunopathology. When the immune system becomes defective, however, numerous disease states result. One of the aims of immunotherapy is to enhance the cellular immune response in diseases characterized by immunosuppression and suppress the cellular immune response in subjects with diseases characterized by an overactive cellular immune response. In other instances, cellular immunotherapy is used to augment a healthy immune system.

[0081] Cellular therapies also include cell replacement therapies of non-immune cells. Such therapies can be used in the treatment of degenerative diseases or disorders, and injury, in which one or more cell populations or tissues are damaged or dysfunctional. Such cellular therapies include the administration of undifferentiated cells, such as stem cells, including embryonic stem cells, adult stem cells, as well as differentiated cells, such as, for example, neuronal, skin, adrenal, keratinocyte, blood, endothelial, kidney, bone, muscle, heart, retinal, pancreas and liver cells.

[0082] Any type of mammalian cell can be included in the cell compositions administered to a subject in a cellular therapy protocol, including, but not limited to, stem cells, immune cells and non-immune cells. Exemplary immune cells that can be included in cell compositions for cell therapy are T lymphocytes (including Th1 cells, Th2 cells, tumor infusing lymphocytes (TIL) and cytotoxic T cells (CTL)) antigen presenting cells (APC) (including dendritic cells (DC) and macrophages, and natural killer (NK) cells). Non-immune cells include, but are not limited to, neuronal, skin, adrenal, keratinocyte, blood, endothelial, kidney, bone, muscle, heart, retinal, pancreas and liver cells. The cells can be activated prior to administration. For example, lymphokine-activated killer (LAK) cells are NK cells stimulated to kill tumor cells (U.S. Pat. No. 4,690,915; Clark et al., (1990) Cancer Res 50:7343-7350), and can be included in cell compositions for cell therapy.

[0083] Cells that have been genetically engineered or modified, such as to express one or more heterologous genes also are used in cell therapy. For example, cells can be engineered to express growth factors, cytokines, growth factor receptors, cytokine receptors, tumor antigen-specific receptors, suicide molecules, and detectable proteins (see e.g. June et al., (2007) 117:1466-1476). Cells also can be infected with replication competent or replication deficient viruses, including adenovirus, reovirus, vaccinia virus, herpes virus and parapox virus also can be included in the cell compositions for use in cell therapy. In some examples, the virus is a gene therapy vector.

[0084] 1. Bone Marrow Transplant

[0085] Bone marrow transplant (BMT) is an example of cell therapy that had been widely used for many years for the treatment of several cancers, including leukemia, aplastic anemia, lymphomas such as Hodgkin's disease, multiple myeloma, neuroblastoma, immune deficiency disorders and some solid tumors such as breast and ovarian cancer. Bone marrow transplants can be autologous, syngeneic or allogeneic. Bone marrow contains three types of stem cells; hematopoietic stem cells (HSCs), mesenchymal stem cells (MSCs) and endothelial stem cells. Thus, BMT is a type of stem cell therapy. Bone marrow transplant typically involves treatment of patients with high dose (myeloablative) chemotherapy and/or radiation. This myeloablative conditioning results in destruction of the bone marrow leading to the loss of a functioning immune system. The subjects are then administered cells from the donor bone marrow intravenously to replace the destroyed bone marrow and restore immune function. In some examples, non-myeloablative bone marrow transplants are performed.

[0086] The ability of myeloablative conditioning followed by allogeneic BMT to cure certain hematological malignancies is widely recognized. The anti-tumor effect mediated by the allogeneic cell transplant is known as the graft vs. tumor (GVT) effect (also called the graft vs. leukemia effect and the graft vs. malignancy effect and the graft vs. myeloma effect). GVT activity after allogeneic cell therapy is known to be effective in treating several cancers, including lymphoid leukemias (Rondon et al. (1996) Bone Marrow Transplant 18:669-672), multiple myeloma (Tricot et al. (1996) Blood 87:1196-1198) and breast cancer (Eibl et al. (1996) Blood 88:1501-8).

[0087] 2. T Cell Therapy

[0088] Cell therapy includes T cell therapy (also called T adoptive therapy), in which one or more populations of T cells are administered to a subject, typically for the treatment of cancer (June et al., (2007) J Clin Invest 117:1466-1476). Such methods often involve the ex vivo activation and expansion of T-cells. In some instances, cell therapy involves the removal of immune cells from a subject, ex vivo processing (i.e., activation, purification and/or expansion of the cells) and the subsequent infusion of the resulting cells back into the same subject. Lymphocytes can be isolated from tumor lesions, from lymph nodes draining the tumor or a tumor vaccine site, or from peripheral blood lymphocytes stimulated with tumor antigens in vitro.

[0089] T cell therapy includes therapy with compositions containing tumor-infiltrating lymphocytes (TIL) (U.S. Pat. No. 5,126,132, Kono et al. (2002) Clin. Cancer Res. 8:1767-1771, Dudley et al. (2005) J. Clin. Oncol. 23:2346-2357.), including CD8⁺ TIL cells (Figlin et al. (1997) Journal of Urology 158:740), cytotoxic T-cells (U.S. Pat. Nos. 6,255,073 and 5,846,827), CD4⁺ T-cells activated with anti-CD3 monoclonal antibody in the presence of IL-2 (Nishimura (1992) J. Immunol. 148:285), T-cells co-activated with anti-CD3 and anti-CD28 in the presence of IL-2 (Garlie et al. (1999) Journal of Immunotherapy 22:336), antigen-specific CD8⁺ CTL T-cells produced ex vivo and expanded with anti-CD3 and anti-CD28 monoclonal antibodies (mAb) in the presence of IL-2 (Oelke et al. (2000) Clinical Cancer Research 6:1997), and various other preparations of lymphocytes (U.S. Pat. Nos. 6,194,207, 5,443,983, 6,040,180, 5,766,920 and 6,204,058). In some examples, the effectiveness of T-cells in cell therapy protocols is enhanced when the T-cell population is in a state of maximal activation upon infusion. For example, highly activated allogenic T cells can be used in cell therapy to elicit a host vs. graft (HVG) effect, to stimulate the immune system (see, e.g. U.S. Pat. No. 7,435,592). Thus, included among the cell compositions containing T cells that are useful for cell therapy are compositions containing activated T cells.

[0090] 3. Stem Cell Therapy

[0091] While stem cells traditionally have been used in the treatment of many cancers, such as in immuno-reconstitution following cancer development of cancer treatments, their role in the generation and/or recurrence of cancers is of increasing concern. For example, a body of evidence indicates that a small population of stem cells exists in a tumor. The cells are called cancer stem cells, and are thought to be important for cancer growth and recurrence. Thus, eradication of these neoplastic stem cells is a goal in any cancer treatment.

[0092] A further example of the potential tumorogenic nature of stem cells is seen in the development of stem-cell derived tumors following stem cell implantation or engraftment. Because of their self-renewing capacity and multilineage potential, stem cells are viewed as a valuable tool in cell-replacement therapy. However, this self-renewing capacity can become detrimental in instances where the stem cells rapidly differentiate in an uncontrolled manner to form benign or malignant tumors. For example, some embryonic stem cells form teratomas following implantation in both immunocompetent and immunocompromised animals.

[0093] a. Stem Cells

[0094] Stem cells can be divided into three main categories. Embryonic stem cells (ESCs) originate from the inner cell mass of the blastocyst and have unlimited self-renewing capacity and multilineage potential. Germinal stem cells are derived from the primary germinal layers of the embryo and differentiate into progenitor cells to produce specific organ cells. Somatic or adult stem cells (ASCs) are progenitor cells that exist in mature tissue and are less totipotent than ESCs. ASCs include, but are not limited to, hematopoietic stems cells (HSCs) from bone marrow, and other primitive progenitor cells such as mesenchymal stem cells (MSCs) and multipotent adult progenitor cells (PAPCs).

[0095] Because of their unique regenerative potential to differentiate into any cell type, ESCs are of particular interest for treating diseases and conditions in which damaged or destroyed cell populations or tissues need to be repaired or regenerated to restore function. Included among these diseases and conditions are, for example, degenerative diseases or conditions and acute or chronic injuries in which one or more cell populations are defective or have been depleted or destroyed. Engraftment of ESCs can provide a source of healthy cells of the desired phenotype to replace the defective or destroyed cells. Once the ESCs are implanted or engrafted into the patient, such as at the location of cell or tissue damage, the ESCs can differentiate into the desired cell or tissue type based on the physical and chemical signals in the local extracellular microenvironment. Engrafted stem cells also can have indirect therapeutic effects, such as the promotion of differentiation of endogenous cells, and immunomodulatory effects as a result of the production of soluble factors.

[0096] Other stem cells, including ASCs, also are used in stem cell therapy. ASCs can be isolated from, for example, bone marrow, adipose tissues, and peripheral blood. Because ASCs include HSCs, they can be of particular use in hematopoietic cell transplantation, such as in leukemias and following high dose chemotherapy to restore bone marrow and the immune system (see e.g., Edwards (2004) Reprod. Biomed. Online 9:541-583). ASCs also can be used in tissue regeneration, including non-hematopoietic tissue regeneration (see e.g., Serakinci et al., (2006) Eur J Cancer 42:1243-1246, Ting et al., (2008) Crit Rev Oncol Hematol 65:81-93).

[0097] Any stem cell can be used in stem cell therapy, where that stem cell has the potential to differentiate into the particular cell or tissue type of interest. In some instances, partial differentiation is induced in vitro prior to administration to a subject in a stem cell therapy protocol. This partial differentiation can be directed by, for example, the addition or removal of appropriate growth factors during stem cell culture, to produce cells of a particular lineage (see e.g. Murry, et al., (2008) Cell 132:661-680, Irion et al. (2009) Cold Spring Harb Symp Quant Biol. 2009 Mar. 27).

[0098] Embryonic Stem Cells

[0099] Embryonic stem cells (ESCs) are ideal candidates for therapeutic purposes due to their higher totipotency and indefinite life span compared to adult stem cells. ESCs can be kept undifferentiated in culture or be differentiated to tissues representing all three germ layers, both in vivo and in vitro. ESCs typically are derived from embryos cultured to the blastocyst stage using methods well known in the art (see e.g., Thomson et al., (1998) Science 282:1145-1147, U.S. Pat. Nos. 5,843,780, 5,914,268, 7,029,913), but also can be produced by other methods such as somatic cell nuclear transfer (Byrne et al. (2007) Nature 450:497-502). ESCs can be cultured in an undifferentiated state using methods well know in the art (see e.g. U.S. Pat. No. 7,432,104 and Hoffman et al., (2005) Nat Biotech 6:699-708). For example, feeder layers, such as fibroblast feeders, typically are used, although feeder free systems also have been developed (Rosler et al. (2004) Dev. Dynamics 229:259-274).

[0100] Human ESC express some of the classical markers of pluripotent cells such as OCT4, alkaline phosphatase and show high levels of telomerase activity (Thomson et al., (1998) Science 282:1145-1147, Reubinoff et al., (2000) Nature Biotechnology 18:399-404). Human ESC also can express a number of other markers, including CD9, Sox2, Thy1, major histocompatibility complex class 1, SSEA-4, TRA-1-60, TRA-1-81, AC133, c-kit and flt3 (Henderson et al. (2002) Stem Cells 20:329-337, Hoffman et al. (2005) Nat Biotech 6:699-708).

[0101] ESCs cells have the potential to differentiate into nearly all cell types of the body. In vitro they are able to generate embryoid bodies (structures with three germ layers formed by pluripotent hES cells grown in three-dimensional culture which express marker genes of all three germ layers and for different cell types. ESCs can differentiate into, for example, neuronal, skin, adrenal, keratinocyte, blood, endothelial, kidney, bone, muscle, heart, pancreas and liver cells (for review, see e.g. Stojkovic et al., (2004) Reproduction 128:259-267) and Hoffman et al. (2005 Nat Biotech 6:699-708).

[0102] Compositions containing ESCs can, therefore, be used to treat conditions amenable to ESC therapy, such as degenerative conditions or injuries in which replacement and regeneration of cells is required. ESC from humans (see e.g., Thomson et al., (1998) Science 282:1145-1147, Heins et al., (2004) Stem Cells 22:367-376, Sjögren et al., (2004) Reprod Biomed Online 9(3):326-9, Hoffman et al., Nature Biotechnology, 23: 669-708, U.S. Pat. No. 6,875,607), mice (se e.g. U.S. Pat. No. 6,190,910), rat (see e.g. Ping et al., (2008) Cell 135:1299-1310; Buehr et al., (2008) Cell 135:1287-1298) and non-human primates (Thomson et al. (1995) Proc Natl Acad Sci USA 92:7844-7848) are known in the art. Numerous human ESCs have been identified. Table 1 sets forth exemplary human ESCs, any one or more of which can be included in stem compositions for use in the treatment of conditions amenable to ESC therapy.

TABLE 1
Exemplary human ESCs

| ESC Name | Provider |
|---|---|
| ACT-14 | Advanced Cell |
| | Technology |
| AS034 | Cellartis AB |
| AS034.1 | Cellartis AB |
| AS034.2 | Cellartis AB |
| AS038 | Cellartis AB |
| AS079 | Cellartis AB |
| AS094 | Cellartis AB |
| BG01 | BresaGen, Inc. |
| BG02 | BresaGen, Inc. |
| BG03 | BresaGen, Inc. |
| BG04 | BresaGen, Inc. |
| CH01 | Cell & Gene Therapy |
| | Research Institute |
| CH02 | Cell & Gene Therapy |
| | Research Institute |
| CLS1 | Aalborg University, |
| | Denmark |
| CLS2 | Aalborg University, |
| | Denmark |
| CLS3 | Aalborg University, |
| | Denmark |
| CLS4 | Aalborg University, |
| | Denmark |
| ES01 | ES Cell International |
| ES02 | ES Cell International |
| ES03 | ES Cell International |
| ES04 | ES Cell International |
| ES05 | ES Cell International |
| ES06 | ES Cell International |
| ESM01 | Institute of Gene Biology; |
| | Russian Academy of |
| | Sciences |
| ESM02 | Institute of Gene Biology; |
| | Russian Academy of |
| | Sciences |
| ESM03 | Institute of Gene Biology; |
| | Russian Academy of |
| | Sciences |
| FC018 | Cellartis AB |
| FES 21 | University of Helsinki |
| FES 22 | University of Helsinki |
| FES 29 | University of Helsinki |
| FES 30 | University of Helsinki |
| GE01 | Geron Corporation |
| GE07 | Geron Corporation |
| GE09 | Geron Corporation |
| GE13 | Geron Corporation |
| GE14 | Geron Corporation |
| GE91 | Geron Corporation |
| GE92 | Geron Corporation |
| hES-NCL1 | University of Newcastle |
| | upon Tyne, UK |
| HS181 | Karolinska Institute |
| HS207 | Karolinska Institute |
| HUES1 | HUES Cell Facility |
| HUES10 | HUES Cell Facility |
| HUES11 | HUES Cell Facility |
| HUES12 | HUES Cell Facility |
| HUES13 | HUES Cell Facility |
| HUES14 | HUES Cell Facility |
| HUES15 | HUES Cell Facility |
| HUES16 | HUES Cell Facility |
| HUES17 | HUES Cell Facility |
| HUES2 | HUES Cell Facility |
| HUES3 | HUES Cell Facility |
| HUES4 | HUES Cell Facility |
| HUES5 | HUES Cell Facility |
| HUES6 | HUES Cell Facility |
| HUES7 | HUES Cell Facility |
| HUES8 | HUES Cell Facility |
| HUES9 | HUES Cell Facility |
| KhES-1 | Department of Stem Cell |
| | Biology, Institute for |
| | Frontier Medical Sciences, |
| | Kyoto University |
| KhES-2 | Department of Stem Cell |
| | Biology, Institute for |
| | Frontier Medical Sciences, |
| | Kyoto University |
| KhES-3 | Department of Stem Cell |
| | Biology, Institute for |
| | Frontier Medical Sciences, |
| | Kyoto University |
| MB01 | Maria Biotech Co. Ltd. |
| MB02 | Maria Biotech Co. Ltd. |
| MB03 | Maria Biotech Co. Ltd. |
| Miz-hES1 | MizMedi Hospital - Seoul |
| | National University |
| Miz-hES10 | MizMedi Hospital - Seoul |
| | National University |
| Miz-hES11 | MizMedi Hospital - Seoul |
| | National University |
| Miz-hES12 | MizMedi Hospital - Seoul |
| | National University |
| Miz-hES13 | MizMedi Hospital - Seoul |
| | National University |
| Miz-hES14 | MizMedi Hospital - Seoul |
| | National University |
| Miz-hES15 | MizMedi Hospital - Seoul |
| | National University |
| Miz-hES2 | MizMedi Hospital - Seoul |
| | National University |
| Miz-hES3 | MizMedi Hospital - Seoul |
| | National University |
| Miz-hES4 | MizMedi Hospital - Seoul |
| | National University |
| Miz-hES5 | MizMedi Hospital - Seoul |
| | National University |
| Miz-hES6 | MizMedi Hospital - Seoul |
| | National University |
| Miz-hES7 | MizMedi Hospital - Seoul |
| | National University |
| Miz-hES8 | MizMedi Hospital - Seoul |
| | National University |
| NC01 | National Centre For |
| | Biological Sciences/Tata |
| | Institute of Fundamental |
| | Research |
| NC02 | National Centre For |
| | Biological Sciences/Tata |
| | Institute of Fundamental |
| | Research |
| NC03 | National Centre For |
| | Biological Sciences/Tata |
| | Institute of Fundamental |
| | Research |
| ReliCellhES1 | Reliance Life Sciences |
| RH1 | Roslin Institute |
| RH3 | Roslin Institute |
| RH4 | Roslin Institute |
| RH5 | Roslin Institute |
| RH6 | Roslin Institute |
| RH7 | Roslin Institute |
| RL05 | Reliance Life Sciences |
| RL07 | Reliance Life Sciences |
| RL10 | Reliance Life Sciences |
| RL13 | Reliance Life Sciences |
| RL15 | Reliance Life Sciences |
| RL20 | Reliance Life Sciences |
| RL21 | Reliance Life Sciences |
| Royan H1 | Royan Institute |
| SA001 | Cellartis AB |
| SA002 | Cellartis AB |
| SA002.5 | Cellartis AB |
| SA046 | Cellartis AB |
| SA085 | Cellartis AB |
| SA111 | Cellartis AB |
| SA121 | Cellartis AB |
| SA142 | Cellartis AB |
| SA167 | Cellartis AB |
| SA181 | Cellartis AB |
| SA191 | Cellartis AB |
| SA196 | Cellartis AB |
| SA202 | Cellartis AB |
| SA203 | Cellartis AB |
| SA211 | Cellartis AB |
| SA218 | Cellartis AB |
| SA240 | Cellartis AB |
| SA279 | Cellartis AB |
| SA348 | Cellartis AB |
| SA352 | Cellartis AB |
| SA399 | Cellartis AB |
| SA611 | Cellartis AB |
| SI-100 | Stemride International |
| | Ltd. |
| SI-101 | Stemride International |
| | Ltd. |
| SI-102 | Stemride International |
| | Ltd. |
| SI-103 | Stemride International |
| | Ltd. |
| SI-104 | Stemride International |
| | Ltd. |
| SI-105 | Stemride International |
| | Ltd. |
| SI-106 | Stemride International |
| | Ltd. |
| SI-107 | Stemride International |
| | Ltd. |
| SI-108 | Stemride International |
| | Ltd. |
| SI-109 | Stemride International |
| | Ltd. |
| SI-110 | Stemride International |
| | Ltd. |
| SI-111 | Stemride International |
| | Ltd. |
| SI-114 | Stemride International |
| | Ltd. |
| SI-115 | Stemride International |
| | Ltd. |
| SI-122 | Stemride International |
| | Ltd. |
| SI-123 | Stemride International |
| | Ltd. |
| SI-124 | Stemride International |
| | Ltd. |
| SI-125 | Stemride International |
| | Ltd. |
| SI-126 | Stemride International |
| | Ltd. |
| SI-128 | Stemride International |
| | Ltd. |
| SI-130 | Stemride International |
| | Ltd. |
| SI-131 | Stemride International |
| | Ltd. |
| SI-132 | Stemride International |
| | Ltd. |
| SI-133 | Stemride International |
| | Ltd. |
| SI-134 | Stemride International |
| | Ltd. |
| SI-135 | Stemride International |
| | Ltd. |
| SI-137 | Stemride International |
| | Ltd. |
| SI-138 | Stemride International |
| | Ltd. |
| SI-139 | Stemride International |
| | Ltd. |
| SI-140 | Stemride International |
| | Ltd. |
| SI-141 | Stemride International |
| | Ltd. |
| SI-144 | Stemride International |
| | Ltd. |
| SI-145 | Stemride International |
| | Ltd. |
| SI-146 | Stemride International |
| | Ltd. |
| SI-148 | Stemride International |
| | Ltd. |
| SI-149 | Stemride International |
| | Ltd. |
| SI-15 | Stemride International |
| | Ltd. |
| SI-150 | Stemride International |
| | Ltd. |
| SI-151 | Stemride International |
| | Ltd. |
| SI-153 | Stemride International |
| | Ltd. |
| SI-154 | Stemride International |
| | Ltd. |
| SI-155 | Stemride International |
| | Ltd. |
| SI-156 | Stemride International |
| | Ltd. |
| SI-157 | Stemride International |
| | Ltd. |
| SI-158 | Stemride International |
| | Ltd. |
| SI-159 | Stemride International |
| | Ltd. |
| SI-160 | Stemride International |
| | Ltd. |
| SI-161 | Stemride International |
| | Ltd. |
| SI-162 | Stemride International |
| | Ltd. |
| SI-163 | Stemride International |
| | Ltd. |
| SI-164 | Stemride International |
| | Ltd. |
| SI-165 | Stemride International |
| | Ltd. |
| SI-167 | Stemride International |
| | Ltd. |
| SI-168 | Stemride International |
| | Ltd. |
| SI-169 | Stemride International |
| | Ltd. |
| SI-170 | Stemride International |
| | Ltd. |
| SI-171 | Stemride International |
| | Ltd. |
| SI-172 | Stemride International |
| | Ltd. |
| SI-174 | Stemride International |
| | Ltd. |
| SI-175 | Stemride International |
| | Ltd. |
| SI-176 | Stemride International |
| | Ltd. |
| SI-177 | Stemride International |
| | Ltd. |
| SI-178 | Stemride International |
| | Ltd. |
| SI-179 | Stemride International |
| | Ltd. |
| SI-18 | Stemride International |
| | Ltd. |
| SI-180 | Stemride International |
| | Ltd. |
| SI-182 | Stemride International |
| | Ltd. |
| SI-183 | Stemride International |
| | Ltd. |
| SI-184 | Stemride International |
| | Ltd. |
| SI-185 | Stemride International |
| | Ltd. |
| SI-186 | Stemride International |
| | Ltd. |
| SI-187 | Stemride International |
| | Ltd. |
| SI-188 | Stemride International |
| | Ltd. |
| SI-189 | Stemride International |
| | Ltd. |
| SI-191 | Stemride International |
| | Ltd. |
| SI-192 | Stemride International |
| | Ltd. |
| SI-193 | Stemride International |
| | Ltd. |
| SI-194 | Stemride International |
| | Ltd. |
| SI-195 | Stemride International |
| | Ltd. |
| SI-196 | Stemride International |
| | Ltd. |
| SI-197 | Stemride International |
| | Ltd. |
| SI-198 | Stemride International |
| | Ltd. |
| SI-199 | Stemride International |
| | Ltd. |
| SI-200 | Stemride International |
| | Ltd. |
| SI-201 | Stemride International |
| | Ltd. |
| SI-202 | Stemride International |
| | Ltd. |
| SI-203 | Stemride International |
| | Ltd. |
| SI-204 | Stemride International |
| | Ltd. |
| SI-205 | Stemride International |
| | Ltd. |
| SI-206 | Stemride International |
| | Ltd. |
| SI-208 | Stemride International |
| | Ltd. |
| SI-209 | Stemride International |
| | Ltd. |
| SI-21 | Stemride International |
| | Ltd. |
| SI-210 | Stemride International |
| | Ltd. |
| SI-211 | Stemride International |
| | Ltd. |
| SI-213 | Stemride International |
| | Ltd. |
| SI-214 | Stemride International |
| | Ltd. |
| SI-215 | Stemride International |
| | Ltd. |
| SI-216 | Stemride International |
| | Ltd. |
| SI-217 | Stemride International |
| | Ltd. |
| SI-221 | Stemride International |
| | Ltd. |
| SI-24 | Stemride International |
| | Ltd. |
| SI-27 | Stemride International |
| | Ltd. |
| SI-28 | Stemride International |
| | Ltd. |
| SI-31 | Stemride International |
| | Ltd. |
| SI-33 | Stemride International |
| | Ltd. |
| SI-53 | Stemride International |
| | Ltd. |
| SI-60 | Stemride International |
| | Ltd. |
| SI-62 | Stemride International |
| | Ltd. |
| SI-63 | Stemride International |
| | Ltd. |
| SI-79 | Stemride International |
| | Ltd. |
| SI-80 | Stemride International |
| | Ltd. |
| SI-81 | Stemride International |
| | Ltd. |
| SI-93 | Stemride International |
| | Ltd. |
| SI-94 | Stemride International |
| | Ltd. |
| SI-95 | Stemride International |
| | Ltd. |
| SI-96 | Stemride International |
| | Ltd. |
| SI-97 | Stemride International |
| | Ltd. |
| SI-98 | Stemride International |
| | Ltd. |
| SI-99 | Stemride International |
| | Ltd. |
| SNUhES1 | Seoul National University |
| SNUhES2 | Seoul National University |
| SNUhES3 | Seoul National University |
| TE-03 | Technion-Israel Institute |
| | of Technology |
| TE-04 | Technion-Israel Institute |
| | of Technology |
| TE-06 | Technion-Israel Institute |
| | of Technology |
| TE-07 | Technion-Israel Institute |
| | of Technology |
| TE-32 | Technion-Israel Institute |
| | of Technology |
| TE-33 | Technion-Israel Institute |
| | of Technology |
| TE-62 | Technion-Israel Institute |
| | of Technology |
| TE-72 | Technion-Israel Institute |
| | of Technology |
| UC01 | University of California at |
| | San Francisco |
| UC06 | University of California at |
| | San Francisco |
| VAL-1 | Valencia Stem Cell Bank |
| VAL-2 | Valencia Stem Cell Bank |
| VAL-3 | Valencia Stem Cell Bank |
| VAL-4 | Valencia Stem Cell Bank |
| WA01 | Wisconsin Alumni |
| | Research Foundation |
| | (WiCell Research |
| | Institute) |
| WA07 | Wisconsin Alumni |
| | Research Foundation |
| | (WiCell Research |
| | Institute) |
| WA09 | Wisconsin Alumni |
| | Research Foundation |
| | (WiCell Research |
| | Institute) |
| WA13 | Wisconsin Alumni |
| | Research Foundation |
| | (WiCell Research |
| | Institute) |
| WA14 | Wisconsin Alumni |
| | Research Foundation |
| | (WiCell Research |
| | Institute) |

Modified from stemcellcommunity.org/

[0103] ESCs can be administered as undifferentiated cells or can be partially differentiated prior to administration in cell-replacement therapies. For example, ESCs can be differentiated in vitro for 1, 2, 3, 4, 5, 6, 7, 8, 9, 10, 11, 12, 13, 14, 15, 16, 17, 18, 19, 20, 25 or 30 days or more before they are administered to a subject. Conditions and methods for differentiation of ESCs are well known in the art (see e.g. Murry et al. (2008) Cell 132:661-680, Irion et al. (2009) Cold Spring Harb Symp Quant Biol. 2009 Mar. 27). Basic methods that have been developed to promote differentiation of ESCs include, for example, the formation of three-dimensional aggregates known as embryoid bodies (EBs), the culture of ESCs as monolayers on extracellular matrix proteins, and the culture of ESCs directly on supportive stromal layers. In one example of differentiation in vitro, once a population of ESCs resembling the epiblast of the embryo is formed, the population can be induced with, for example, Wnt, activin, BMP4, or serum, to generate a primitive streak (PS)-like population. If these pathways are not activated, the epiblast population can differentiate into the ectoderm lineage, with the potential to differentiate into neurons. Ectoderm differentiation can be blocked by BMP, Wnt, and activin signaling, which instead results in the formation of a PS cell population. Posterior PS cells expressing Foxa2^{low/-} produce Flk-1⁺ mesoderm, whereas the anterior PS cells are generate Foxa2⁺ endoderm. However, these fates are not firmly established, as activin can induce endoderm from the posterior PS population. Flk-1 mesoderm can be induced to form cells of the hematopoietic and vascular lineage by the addition of VEGF to culture. Foxa2⁺ endoderm can be induced to form cells of either the hepatocyte or pancreatic lineages, by the addition of BMP4 and bFGF or retinoic acid, respectively (Murry et al. (2008) Cell 132:661-680).

[0104] b. Conditions Amenable to Stem Cell Therapy

[0105] Conditions amenable to stem cell therapy include any in which one or more cell populations are defective or have been depleted or destroyed. Such conditions include degenerative disorders or conditions and acute or chronic injuries. Once the stem cells are implanted or engrafted into the patient, such as at the location of cell or tissue damage or dysfunction, the stem cells can differentiate into the desired cell or tissue type based on the physical and chemical signals in the local extracellular microenvironment, thereby replacing the destroyed or defective cells with functional healthy cells. Exemplary conditions include, but are not limited to, cancer, cardiovascular disease, diabetes, spinal cord injury, neurodegenerative disease, traumatic brain injury, Alzheimer's disease, Parkinson's disease, multiple sclerosis (MS), Amyotrophic lateral sclerosis (ALS), Duchenne Muscular Dystrophy, muscle damage or dystrophy, stroke, burns, lung disease, retinal disease, kidney disease, osteoarthritis, and rheumatoid arthritis.

[0106] In one example, stem cell therapy is used to treat cardiovascular disease. Acute or chromic cardiovascular disease can deprive heart tissue of oxygen, thereby killing cardiac muscle cells (cardiomyocytes). This loss triggers a cascade of detrimental events, including formation of scar tissue, an overload of blood flow and pressure capacity, the overstretching of viable cardiac cells attempting to sustain cardiac output, leading to heart failure, and eventual death. Damaged heart muscle tissue can be repaired by implantation of stem cells. In some examples, the stem cell compositions can be administered by an intracoronary route, such as using intracoronary catheterization techniques. The stem cells may can be administered intramyocardially, transendocardially or trans-epicardially. In other examples, in which the patient has a myocardial infarct, the stem cells are delivered to the border area of the infarct.

[0107] Stem cells also can be used to treat diabetes mellitus. Type 1 diabetes results from autoimmune-mediated destruction of insulin-secreting β cells in the islets of Langerhans of the pancreas. Type 2 diabetes results from systemic insulin resistance and reduced insulin secretion by pancreatic β cells. Stem cells have been shown in vitro to differentiate into insulin-producing cells (see e.g. Schuldiner et al. (2000) Proc. Natl. Acad. Sci. USA. 97:11307-11312; Guo et al., (2009) Endocr Rev 30:214-227). Thus, stem cells, including ESCs and ASCs, and their derivatives, such as partially differentiated stem cells, can be used in stem cell therapy for regeneration of pancreatic β cells.

[0108] In other examples, stem cell therapy is used to treat spinal cord injury. Spinal cord injury typically results in permanent disability. Insult to the spinal cord initiates a cascade of concomitant events that include anatomical, physiological, and neurochemical changes often leading to neuronal cell death and syrinx formation. Loss of motor function, altered sensory function, and/or development of chronic or neuropathic pain can then develop depending on the location and severity of injury. Animal studies have indicated that stem cells can repair damage to the spinal cord and restore mobility. For example, embryonic stem cell-derived neural stem cells (NSCs) administered to mice with spinal cord injury resulted in recovery of locomotor function (Kimura et al., (2005) Neurol Res 812-819, Cummings et al., (2006) Neurol Res (2006) 25:474-481). In other studies, embryonic stem cells predifferentiated into neuronal and glial progenitors were used in rats for treatment of pain syndromes following SCI (Hendricks et al. (2006) Mol. Med. 12:34-46).

[0109] Parkinson's disease also is amenable to treatment by engraftment of stem cells. Parkinson's disease is a neurodegenerative disorder that results from the destruction of dopaminergic neurons within a particular region of the brain. Stem cells engrafted into subjects with Parkinson's disease in stem cell therapy can differentiate into functional dopaminergic neurons. Several studies in animal models have demonstrated the effectiveness of treating Parkinson's disease with stem cells and stem cell derivatives (i.e. stem cells that have been differentiated in vitro). For example, intra-striatum transplantation of ES-derived dopaminergic neurons was effective in treating mice in a model of Parkinson's disease (Toriumi et al., (2009) Neurol. Res 31:220-227). In another example, dopaminergic neurons generated from monkey embryonic stem cells attenuated neurological symptoms in a Parkinson primate model (Takagi et al (2005) J Clin Invest. 115:102-109).

[0110] Disorders associated with demyelination in the central nervous system, such as multiple sclerosis, also are amenable to stem cell therapy. Demyelination can occur when the oligodendrocyte or the myelin sheath it produces and maintains is the target of the disease process. Once the axons have been demyelinated, they are vulnerable to atrophy, resulting in neurologic defects. Multiple sclerosis (MS) is an autoimmune disease in which the fatty myelin sheath that wraps around nerve cells and speeds up their rate of transmission is targeted by the immune system. Stem cell therapy can effect remyelination of the axons. For example, autologous non-myeloablative haemopoietic stem cell transplantation in human subjects with MS reversed neurological symptoms (Burt et al., (2009) 8:244-253). This can occur via one or more mechanisms, including, but not limited to, producing soluble immunomodulatory factors, direct cell replacement by differentiating into neural and glial cells in the lesion, and indirect action by promoting neural and glial differentiation of endogenous cells (Yang et al., (2009) J. Neurol Sci 276:1-5).

[0111] The stem cells can be implanted locally at the site of cell damage or dysfunction, or systemically. Exemplary routes of administration of stem cell compositions in stem cell therapy include, but are not limited to, intravenous, intramuscular, intradermal, intraperitonal, intracoronary, intramyocardial, transendocardial, trans-epicardial, intraspinal, intra-arterial, intra-striatum, intra-tumoral, topical, transdermal, rectal or sub-epidermal routes. The most suitable route for administration will vary depending upon the disorder or condition to be treated, for example the location of cell damage or dysfunction. For example, stem cells can be administered intra-arterially or intra-spinally at the site of injury for the treatment of spinal cord injury. In other examples, stem cell compositions can be administered by an intracoronary, intramyocardial, transendocardial or trans-epicardial route for the treatment of cardiovascular disease.

[0112] c. Stem Cell-Associated Tumors

[0113] As discussed above, the ability of stems cells to differentiate is one of the characteristics that makes them appealing for cell-replacement therapy. However, it is this same characteristic that is of significant concern in the clinic. Stem cells that are engrafted into a patient in cell-replacement therapy have the potential not only to differentiate into the desired cell or tissue type, but also have the potential to differentiate in an uncontrolled manner to form benign or malignant tumors.

[0114] In addition to their ability to spontaneously differentiate in vitro in the form of embryoid bodies (EBs), ESCs also can spontaneously differentiate following transplantation in vivo, rapidly forming of tumors called teratomas. These are benign masses of haphazardly differentiated tissues. Teratomas also can appear spontaneously in humans and in mice. Teratomas that arise from ESC transplantation can be immature or mature. Mature teratomas contain only mature, well differentiated tissues, while immature teratomas contain tissues of a more embryonic, less-differentiated mature. When the tumors contain a core of malignant undifferentiated cells, they are considered teratocarcinomas. These malignant undifferentiated cells are termed embryonic carcinoma (EC), and are considered the malignant counterparts of embryonic stem cells (Blum et al., (2008) Adv. Cancer. Res 133-158).

[0115] The injection of pluripotent ESC or ESC-derived precursor cells in both immunocompetent and immunosuppressed rodents can lead to the development of teratomas or teratocarcinomas (see e.g. Bjorklund et al. (2002) Proc Natl Acad Sci USA 99: 2344-2349, Isacson et al. (1995) Nat Med 1: 1189-1194, Reubinoff et al., (2000) Nat Biotechnol 18: 399-404). The teratomas can form in healthy animals as well as those with a disease or condition for which ESCs are being administered for treatment. For example, ESCs that were transplanted intramyocardially into healthy mice formed extracardic teratomas (Cao et al., (2007) Stem Cells Dev. 16:883-891). In another example, ESCs engrafted into the spinal chord of rats can form teratomas at the site of engraftment. This can occur in healthy rats and also rats with acute spinal injury or spinal ischemia (see Example 3, below). In a further example, teratomas formed following transplantation of ESCs in a rat model of Parkinson's disease (Brederlau et al., (2006) Stem Cells 24:1433-1440). Tumor formation also was observed following ESC transplantation in an experimental traumatic brain injury model in rats (Reiss et al., (2007) J. Neurotrauma 24:216-225)

[0116] There is evidence to suggest that culture-adapted human ESCs typically give rise to teratomas of a less-differentiated nature, while nonadapted human ESCs give rise to mature teratomas (Blum et al., (2008) Adv. Cancer. Res 133-158). Further, ESCs appear to more prone to generate tumors when implanted into the same species from which they were derived (Erdo et al. (2003) J Cereb Blood Flow Metab 23: 780-78). Although the exact mechanism by which ESCs become tumorogenic and form teratomas is unknown, recent reports implicate the BIRC5 gene this process. (Blum et al. (2009) Nature Biotechnol 27:281-287). BIRC5 codes for survivin, a protein which both inhibits apoptosis and regulates cell division.

[0117] There is little data regarding the formation of tumors following stem cell engraftment in humans, as such studies typically are not feasible. However, in one recent clinical example, a patient with ataxia telangiectasia (AT) was treated with intracerebellar and intrathecal injection of human fetal neural stem cells. Four years after the first treatment, the patient was diagnosed with a multifocal brain tumor that was shown to be derived from the donor stem cells. (Amariglio et al. (2009) PLoS Medicine 6:221-231).

[0118] While the potential of stem cells for cell-replacement therapy is significant, the formation of stem-cell derived tumors as a result of such treatment is an unacceptable outcome. Thus, provided herein are methods for administering stem cell compositions, wherein development of stem cell-associated tumors is inhibited. Such methods include the administration of an oncolytic virus before, with or after administration of stem cell compositions, as described in detail below. The oncolytic virus also can be mixed with the stem cell composition prior to administration to the subject, to remove any neoplastic cells in the composition.

### D. THERAPEUTIC AND DIAGNOSTIC METHODS FOR THE TREATMENT AND PREVENTION OF STEM CELL-DERIVED TUMORS

[0119] Provided are therapeutic methods for treating and/or preventing the formation of stem cell-derived tumors and metastases. Such methods provide for the safe administration of stem cell therapies and can inhibit or treat complications of tumor formation (e.g. teratoma or teratocarcinoma formation) that result from administration of stem cell compositions to a subject for therapy of a disease or disorder. Exemplary diseases or disorders for which the methods provided herein can be employed include, but are not limited to, cardiovascular disease, cancer, diabetes, spinal cord injury, neurodegenerative disease, Alzheimer's disease, Parkinson's disease, multiple sclerosis, Amyotrophic lateral sclerosis, Duchenne Muscular Dystrophy, muscle damage or dystrophy, stroke, burns, lung disease, retinal disease, kidney disease, osteoarthritis, and rheumatoid arthritis.

[0120] The therapeutic methods provided herein include, but are not limited to, administering a stem Cell therapy, such as the administration of a stem cell composition (e.g., an embryonic stem cell composition) to a subject, in combination with an oncolytic virus provided herein to prevent tumor formation or to treat a tumor resulting from or generated by the administered stem cell composition. In some examples, the virus is administered to a subject having a tumor, where the tumor is caused by the stem cell therapy. In other examples, the virus is administered to a subject who is receiving or has received a stem cell therapy for the prevention of tumor formation.

[0121] The administered viruses are typically attenuated viruses that preferentially accumulate in neoplastic cells, including tumors or metastases. Generally, the administered viruses are replication competent viruses and have the ability to preferentially replicate in tumor cells and/or lyse the tumor cells (i.e., oncolytic viruses). In some examples, administration of a virus provided herein results in elimination of neoplastic cells or neoplastic progenitor cells in the stem cell composition that have the ability to form a tumor. The oncolytic viruses provided herein can eliminate neoplastic cells or neoplastic progenitor cells in a stem cell composition either in vitro or in vivo. In some examples, administration of a virus provided herein results in a slowing the growth of a stem cell-derived tumor. In other examples, the administration of a virus provided herein results in a decrease in the volume of the stem cell-derived tumor. In other examples, the administration of a virus provided herein results in elimination of the stem cell-derived tumor.

[0122] In some examples, the virus is administered concurrently with administration of a stem cell composition. In other examples, the virus is administered at a selected time point following administration of a stem cell composition. In other examples, the stem cell composition is pretreated with the virus prior to administration of the stem cell composition to the subject. In some examples, the stem cell composition is pretreated with the virus prior to administration of the stem cell composition to the subject and the same or different oncolytic virus also is administered concurrently with or subsequent to the administration of the pre-treated stem cell composition.

[0123] The viruses can be administered for diagnosis and/or therapy of subjects, such as, but not limited to humans and other mammals, including rodents, dogs, cats, primates, or livestock.

[0124] 1. Viruses for Use in the Methods Provided

[0125] Viruses for use in the methods provided herein typically are replication competent viruses that can selectively infect neoplastic cells and cause lysis of the infected cell (i.e. oncolytic viruses). Such viruses can accumulate in immunoprivileged cells or immunoprivileged tissues, including tumors and/or metastases, and can infect neoplastic cells of a stem cell composition. Accordingly, these viruses can be used to eliminate neoplastic cells from stem cell compositions, including implanted stem cell compositions, and stem cell-derived tumors. In some examples, the modified viruses have an ability to activate an immune response against tumor cells without aggressively killing the tumor cells.

[0126] Viruses for use in the methods provided herein typically are modified viruses, which are modified relative to the wild-type virus. Such modifications of the viruses provided can enhance one or more characteristics of the virus. Such characteristics can include, but are not limited to, attenuated pathogenicity, reduced toxicity, preferential accumulation in tumor, increased ability to activate an immune response against tumor cells, increased immunogenicity, increased or decreased replication competence, and ability to express additional exogenous proteins, and combinations thereof. For examples, the viruses can be modified to express one or more detectable gene products, including proteins that can be used for detecting, imaging and monitoring of neoplastic cells in the stem cell composition or a stem cell-derived tumor. In other examples, the viruses can be modified to express one or more gene product for the therapy of a tumor.

[0127] Viruses for use in the methods provided herein can contain one or more additional heterologous nucleic acid molecules inserted into the genome of the virus. A heterologous nucleic acid molecule can contain an open reading frame operatively linked to a promoter for expression or can be a non-coding sequence that alters the attenuation of the virus. In some cases, the heterologous nucleic acid replaces all or a portion of a viral gene.

[0128] In some examples, the administered viruses can cause cell lysis or tumor cell death as a result of expression of an endogenous gene or as a result of an exogenous gene. Endogenous or exogenous genes can cause tumor cell lysis or inhibit cell growth as a result of direct or indirect actions, as is known in the art, including lytic channel formation or activation of an apoptotic pathway. Gene products, such as exogenous gene products can function to activate a prodrug to an active, cytotoxic form, resulting in cell death where such genes are expressed.

[0129] The administered virus can stimulate humoral and/or cellular immune response in the subject, such as the induction of cytotoxic T lymphocytes responses against the stem cell-derived tumor. For example, the virus can provide prophylactic and therapeutic effects against a tumor infected by the virus or other infectious diseases, by rejection of cells from tumors or lesions using viruses that express immunoreactive antigens (Earl et al., Science 234: 728-831 (1986); Lathe et al., Nature (London) 32: 878-880 (1987)), cellular tumor-associated antigens (Bernards et al., Proc. Natl. Acad. Sci. USA 84: 6854-6858 (1987); Estin et al., Proc. Natl. Acad. Sci. USA 85: 1052-1056 (1988); Kantor et al., J. Natl. Cancer Inst. 84: 1084-1091 (1992); Roth et al., Proc. Natl. Acad. Sci. USA 93: 4781-4786 (1996)) and/or cytokines (e.g., IL-2, IL-12), costimulatory molecules (B7-1, B7-2) (Rao et al., J. Immunol. 156: 3357-3365 (1996); Chamberlain et al., Cancer Res. 56: 2832-2836 (1996); Oertli et al., J. Gen. Virol. 77: 3121-3125 (1996); Qin and Chatterjee, Human Gene Ther. 7: 1853-1860 (1996); McAneny et al., Ann. Surg. Oncol. 3: 495-500 (1996)), or other therapeutic proteins.

[0130] In some examples, the administration of a virus provided herein causes enhancement of an anti-tumor immune response against the stem cell-derived tumor cells by release of tumor antigens upon tumor cell lysis or tumor cell death. The anti-tumor immune response induced as a result of the tumor-accumulated viruses can result in inhibition of tumor growth, decrease in tumor volume, or elimination of the tumor.

[0131] In some examples, the viruses can be modified to express one or more antigens to elicit antibody production against an expressed gene product and enhance the immune response against the infected tumor cell. The sustained release of antigen can result in an immune response by the viral-infected host, in which the host can develop antibodies against the antigen, and/or the host can mount an immune response against cells expressing the antigen, including an immune response against tumor cells. Thus, the sustained release of antigen can result in immunization against tumor cells. In some embodiments, the viral-mediated sustained antigen release-induced immune response against tumor cells can result in complete removal or killing of all tumor cells. The immunizing antigens can be endogenous to the virus, such as vaccinia antigens on a vaccinia virus used to immunize against smallpox, measles, mumps, or the immunizing antigens can be exogenous antigens expressed by the virus, such as influenza or HIV antigens expressed on a viral capsid surface. In the case of smallpox, for example, a tumor specific protein antigen can be carried by an attenuated vaccinia virus (encoded by the viral genome) for a smallpox vaccine. Thus, the viruses provided herein, including the modified vaccinia viruses can be used as vaccines.

[0132] As shown previously, solid tumors can be treated with viruses, such as vaccinia viruses, resulting in an enormous tumor-specific virus replication, which can lead to tumor protein antigen and viral protein production in the tumors (U.S. Patent Publication No. 2005/0031643). Vaccinia virus administration to mice resulted in lysis of the infected tumor cells and a resultant release of tumor-cell-specific antigens. Continuous leakage of these antigens into the body led to a very high level of antibody titer (in approximately 7-14 days) against tumor proteins, viral proteins, and the virus encoded engineered proteins in the mice. The newly synthesized anti-tumor antibodies and the enhanced macrophage, neutrophils count were continuously delivered via the vasculature to the tumor and thereby provided for the recruitment of an activated immune system against the tumor. The activated immune system then eliminated the foreign compounds of the tumor including the viral particles. This interconnected release of foreign antigens boosted antibody production and continuous response of the antibodies against the tumor proteins to function like an autoimmunizing vaccination system initiated by vaccinia viral infection and replication, followed by cell lysis, protein leakage and enhanced antibody production. Thus, the viruses provided herein and the viruses generated using the methods provided herein can be administered in a complete process that can be applied to therapy or prevention of tumors resulting from stem cell therapies.

[0133] a. Exemplary Viruses

[0134] Exemplary viruses for use in the methods provided herein include cytoplasmic viruses, which do not require entry of viral nucleic acid molecules in to the nucleus of the host cell during the viral life cycle. A variety of cytoplasmic viruses are known, including, but not limited to, pox viruses, African swine flu family viruses, and various RNA viruses such as picornaviruses, caliciviruses, togaviruses, coronaviruses and rhabdoviruses. Exemplary cytoplasmic viruses provided herein are viruses of the poxvirus family, including orthopoxviruses. Exemplary of poxviruses provided herein are vaccinia viruses,

[0135] i. Poxviruses

[0136] In some examples, the virus provided herein is selected from the poxvirus family. Poxviruses include Chordopoxyiridae such as orthopoxvirus, parapoxvirus, avipoxvirus, capripoxvirus, leporipoxvirus, suipoxvirus, molluscipoxvirus and yatapoxvirus, as well as Entomopoxyirinae such as entomopoxvirus A, entomopoxvirus B, and entomopoxvirus C. One skilled in the art can select a particular genera or individual chordopoxyiridae according to the known properties of the genera or individual virus, and according to the selected characteristics of the virus (e.g., pathogenicity, ability to elicit an immune response, preferential tumor localization), the intended use of the virus, the tumor type and the host organism. Exemplary chordopoxyiridae genera are orthopoxvirus and avipoxvirus.

[0137] Avipoxviruses are known to infect a variety of different birds and have been administered to humans. Exemplary avipoxviruses include canarypox, fowlpox, juncopox, mynahpox, pigeonpox, psittacinepox, quailpox, peacockpox, penguinpox, sparrowpox, starlingpox, and turkeypox viruses.

[0138] Orthopoxviruses are known to infect a variety of different mammals including rodents, domesticated animals, primates and humans. Several orthopoxviruses have a broad host range, while others have narrower host range. Exemplary orthopoxviruses include buffalopox, camelpox, cowpox, ectromelia, monkeypox, raccoon pox, skunk pox, tatera pox, uasin gishu, vaccinia, variola, and volepox viruses. In some embodiments, the orthopoxvirus selected can be an orthopoxvirus known to infect humans, such as cowpox, monkeypox, vaccinia, or variola virus. Optionally, the orthopoxvirus known to infect humans can be selected from the group of orthopoxviruses with a broad host range, such as cowpox, monkeypox, or vaccinia virus.

[0139] (1) Vaccinia Viruses

[0140] One exemplary orthopoxvirus for use in the methods provided herein is vaccinia virus. Vaccinia is a cytoplasmic virus, thus, it does not insert its genome into the host genome during its life cycle. The linear dsDNA viral genome of vaccinia virus is approximately 200 kb in size, encoding a total of approximately 200 potential genes. A variety of vaccinia virus strains are available for uses in the methods provided, including Western Reserve (WR), Copenhagen, Tashkent, Tian Tan, Lister, Wyeth, IHD-J, and IHD-W, Brighton, Ankara, MVA, Dairen I, LIPV, LC16M8, LC16MO, LIVP, WR 65-16, Connaught, New York City Board of Health. Exemplary vaccinia viruses are Lister or LIVP vaccinia viruses. In one embodiment, the Lister strain can be an attenuated Lister strain, such as the LIVP (Lister virus from the Institute of Viral Preparations, Moscow, Russia) strain, which was produced by further attenuation of the Lister strain. The LIVP strain was used for vaccination throughout the world, particularly in India and Russia, and is widely available. In another embodiment, the viruses and methods provided herein can be based on modifications to the Lister strain of vaccinia virus. Lister (also referred to as Elstree) vaccinia virus is available from any of a variety of sources. For example, the Elstree vaccinia virus is available at the ATCC under Accession Number VR-1549. The Lister vaccinia strain has high transduction efficiency in tumor cells with high levels of gene expression.

[0141] Vaccinia virus possesses a variety of features for use in cancer gene therapy and vaccination including broad host and cell type range, a large carrying capacity for foreign genes (up to 25 kb of exogenous DNA fragments (approximately 12% of the vaccinia genome size) can be inserted into the vaccinia genome), high sequence homology among different strains for designing and generating modified viruses in other strains, and techniques for production of modified vaccinia strains by genetic engineering are well established (Moss (1993) Curr. Opin. Genet. Dev. 3: 86-90; Broder and Earl (1999) Mol. Biotechnol. 13: 223-245; Timiryasova et al. (2001) Biotechniques 31: 534-540). A variety of vaccinia virus strains are available, including Western Reserve (WR), Copenhagen, Tashkent, Tian Tan, Lister, Wyeth, IHD-J, and IHD-W, Brighton, Ankara, MVA, Dairen I, LIPV, LC16M8, LC16MO, LIVP, WR 65-16, Connaught, New York City Board of Health. Exemplary of vaccinia viruses for use in the methods provided herein include, but are not limited to, Lister strain or LIVP strain of vaccinia viruses.

[0142] The exemplary modifications of the Lister strain described herein (see Example 1) also can be adapted to other vaccinia viruses (e.g., Western Reserve (WR), Copenhagen, Tashkent, Tian Tan, Lister, Wyeth, IHD-J, and IHD-W, Brighton, Ankara, MVA, Dairen I, LIPV, LC16M8, LC16MO, LIVP, WR 65-16, Connaught, New York City Board of Health). The modifications of the Lister strain described herein also can be adapted to other viruses, including, but not limited to, viruses of the poxvirus family, adenoviruses, herpes viruses and retroviruses.

[0143] (2) Modification of Vaccinia Viruses

[0144] Exemplary vaccinia viruses for use in the in methods provided include vaccinia viruses with insertions, mutations or deletions, as described elsewhere herein (see, e.g. Example 1). Exemplary insertions, mutations or deletions include those that result in an attenuated vaccinia virus relative to the wild type strain. For example, vaccinia virus insertions, mutations or deletions can decrease pathogenicity of the vaccinia virus, for example, by reducing the toxicity, reducing the infectivity, reducing the ability to replicate, or reducing the number of non-tumor organs or tissues to which the vaccinia virus can accumulate. Other exemplary insertions, mutations or deletions include, but are not limited to, those that increase antigenicity of the virus, those that permit detection, monitoring, or imaging, those that alter attenuation of the virus, and those that alter infectivity. For example, the ability of vaccinia viruses provided herein to infect and replicate within tumors can be enhanced by mutations that increase the extracellular enveloped form of the virus (EEV) that is released from the host cell, as described elsewhere herein. Modifications can be made, for example, in genes that are involved in nucleotide metabolism, host interactions and virus formation or at other nonessential gene loci. Any of a variety of insertions, mutations or deletions of the vaccinia virus known in the art can be used herein, including insertions, mutations or deletions of: the thymidine kinase (TK) gene, the hemagglutinin (HA) gene, and F14.5L gene, among others (e.g., E2L/E3L, K1L/K2L, superoxide dismutase locus, 7.5K, C7-K1L, J2R, B13R+B14R, A56R, A26L or I4L gene loci). The vaccinia viruses provided herein also can contain two or more insertions, mutations or deletions. Thus, included are vaccinia viruses containing two or more insertions, mutations or deletions of the loci provided herein or other loci known in the art. The viruses provided herein can be based on modifications to the Lister strain and/or LIVP strain of vaccinia virus. Any known vaccinia virus, or modifications thereof that correspond to those provided herein or known to those of skill in the art to reduce toxicity of a vaccinia virus. Generally, however, the mutation will be a multiple mutant and the virus will be further selected to reduce toxicity.

[0145] The modified viruses provided herein can contain one more heterologous nucleic acid sequences for the expression of a heterologous gene. The heterologous nucleic acid is typically operably linked to a promoter for expression of the heterologous gene in the infected cells. Suitable promoter include viral promoters, such as a vaccinia virus natural and synthetic promoters. Exemplary vaccinia viral promoters include, but are not limited to, P11k, P7.5k early/late, P7.5k early, P28 late, synthetic early P_{SE}, synthetic early/late P_{SEL} and synthetic late P_{SL} promoters.

[0146] The viruses provided herein can express one or more genes whose products are useful for tumor therapy. For example, a virus can express a proteins cause cell death or whose products cause an anti-tumor immune response. Such genes can be considered therapeutic genes. A variety of therapeutic gene products, such as toxic or apoptotic proteins, or siRNA, are known in the art, and can be used with the viruses provided herein. The therapeutic genes can act by directly killing the host cell, for example, as a channel-forming or other lytic protein, or by triggering apoptosis, or by inhibiting essential cellular processes, or by triggering an immune response against the cell, or by interacting with a compound that has a similar effect, for example, by converting a less active compound to a cytotoxic compound. Exemplary proteins useful for tumor therapy include, but are not limited to, tumor suppressors, toxins, cytostatic proteins, antiangiogenic proteins, antitumor antibodies, and costimulatory molecules, such as cytokines and chemokines among others provided elsewhere herein and known in the art. The viruses provided herein can also be effective against tumors without the introduction of additional exogenous therapeutic genes.

[0147] The viruses provided herein can express one or more genes whose products are useful for tumor detection and/or imaging. Exemplary gene products for imaging or detection include detectable proteins or proteins that induce detectable signals. Exemplary of detectable proteins or proteins that induce detectable signals are proteins, such as luciferases, fluorescent proteins, receptors that can bind imaging agents, or proteins linked to imaging or diagnostic moieties. The viruses provided herein also can encode proteins, such as transporter proteins (e.g., the human norepinephrine transporter (hNET) or the human sodium iodide symporter (hNIS)), which can provide increase uptake diagnostic and therapeutic moieties across the cell membrane of infected cells for therapy, imaging or detection.

[0148] Imaging or diagnostic moieties include those that can emit a signal that is detectable by optical or non-optical imaging methods. Detection of the signal by imaging modalities such as, for example, by positron emission tomography (PET) and, thereby allows visualization of the infected tissues, such a tumor or an inflammation.

[0149] One skilled in the art can select from any of a variety of viruses, according to a variety of factors, including, but not limited to, the intended use of the virus, such as a diagnostic and/or therapeutic use (e.g., tumor therapy or diagnosis, vaccination, antibody production, or heterologous protein production), the host organism, and the type of tumor. An oncolytic virus for the methods provided herein can exhibit one or more desired characteristics for use as a therapeutic agent, such as, for example attenuated pathogenicity, reduced toxicity, preferential accumulation in immunoprivileged cells and tissues, such as tumor, ability to activate an immune response against tumor cells, immunogenic, replication competent, and are able to express exogenous proteins, and combinations thereof.

[0150] (3) Exemplary Modified Vaccinia Viruses

[0151] Exemplary vaccinia viruses contemplated for use in the methods provided include those derived from vaccinia virus strain GLV-1h68 (also named RVGL21, SEQ ID NO: 1), which has been described in U.S. Pat. Pub. No. 2005-0031643 and is incorporated herein by reference in its entirety. GLV-1h68 contains DNA insertions gene loci of the vaccinia virus LIVP strain (SEQ ID NO: 2, a vaccinia virus strain, originally derived by adapting the Lister strain (ATCC Catalog No. VR-1549) to calf skin (Institute of Viral Preparations, Moscow, Russia, Al'tshtein et al., (1983) Dokl. Akad. Nauk USSR 285:696-699)). GLV-1h68 contains expression cassettes encoding detectable marker proteins in the F14.5L (also designated in LIVP as F3), thymidine kinase (TK) and hemagglutinin (HA) gene loci. An expression cassette containing a Ruc-GFP cDNA molecule (a fusion of DNA encoding Renilla luciferase and DNA encoding GFP) under the control of a vaccinia synthetic early/late promoter P_{SEL} ((P_{SEL})Ruc-GFP) is inserted into the F14.5L gene locus; an expression cassette containing a DNA molecule encoding beta-galactosidase under the control of the vaccinia early/late promoter P_{7.5k} ((P_{7.5k})LacZ) and DNA encoding a rat transferrin receptor positioned in the reverse orientation for transcription relative to the vaccinia synthetic early/late promoter P_{SEL} ((P_{SEL})rTrfR) is inserted into the TK gene locus (the resulting virus does not express transferrin receptor protein since the DNA molecule encoding the protein is positioned in the reverse orientation for transcription relative to the promoter in the cassette); and an expression cassette containing a DNA molecule encoding β-glucuronidase under the control of the vaccinia late promoter P₁₁ₖ ((P₁₁ₖ)gusA) is inserted into the HA gene locus. The GLV-1h68 virus exhibits a strong preference for accumulation in tumor tissues as compared to non-tumorous tissues following systemic administration of the virus to tumor bearing subjects. This preference is significantly higher than the tumor selective accumulation of other vaccinia viral strains, such as WR (see, e.g. U.S. Pat. Pub. No. 2005-0031643 and Zhang et al. (2007) Cancer Res. 67(20):10038-46). Modified viruses provided herein for the uses and methods provided can be derived from GLV-1h68. Exemplary viruses are generated by replacement of one or more expression cassettes of the GLV-1h68 strain with heterologous DNA encoding gene products for therapy and/or imaging.

[0152] Non-limiting examples viruses that are derived from attentuated LIVP viruses, such as GLV-1h68, and can be employed in the methods and uses provided include, but are not limited to, LIVP viruses described in U.S. Patent Publication Nos. 2005/0031643, 2004/0234455 and 2004/0213741 and U.S. patent application Ser. Nos. 11/975,088, 11/975,090, and 12/157,960, which are incorporated herein by reference in their entirety. For example, the vaccinia virus can be selected from among GLV-1h22, GLV-1h68, GLV-1i69, GLV-1h70, GLV-1h71, GLV-1h72, GLV-1h73, GLV-1h74, GLV-1h81, GLV-1h82, GLV-1h83, GLV-1h84, GLV-1h85, or GLV-1h86, which are described in U.S. application Ser. No. 11/975,088 and GLV-1h104, GLV-1h105, GLV-1h106, GLV-1h107, GLV-1h108 and GLV-1h109, which are described in U.S. application Ser. No. 11/975,090; GLV-1h99, GLV-1h100, GLV-1h101, GLV-1h139, GLV-1h146, GLV-1h151, GLV-1h152 and GLV-1h153, which are described in U.S. application Ser. No. 12/157,960. A description of each of these strains is provided herein (e.g., see Example 1).

[0153] Exemplary of viruses which have one or more expression cassettes removed from GLV-1h68 and replaced with a heterologous non-coding DNA molecule include GLV-1h70, GLV-1h71, GLV-1h72, GLV-1h73, GLV-1h74, GLV-1h85, and GLV-1h86. GLV-1h70 contains (P_{SEL})Ruc-GFP inserted into the F14.5L gene locus, (P_{SEL})rTrfR and (P_{7.5k})LacZ inserted into the TK gene locus, and a non-coding DNA molecule inserted into the HA gene locus in place of (P₁₁ₖ)gusA. GLV-1h71 contains a non-coding DNA molecule inserted into the F14.5L gene locus in place of (P_{SEL})Ruc-GFP, (P_{SEL})rTrfR and (P_{7.5k})LacZ inserted into the TK gene locus, and (P₁₁ₖ)gusA inserted into the HA gene locus. GLV-1h72 contains (P_{SEL})Ruc-GFP inserted into the F14.5L gene locus, a non-coding DNA molecule inserted into the TK gene locus in place of (P_{SEL})rTrfR and (P_{7.5k})LacZ, and P₁₁ₖgusA inserted into the HA gene locus. GLV-1h73 contains a non-coding DNA molecule inserted into the F14.5L gene locus in place of (P_{SEL})Ruc-GFP, (P_{SEL})TrfR and (P_{7.5k})LacZ inserted into the TK gene locus, and a non-coding DNA molecule inserted into the HA gene locus in place of (P₁₁ₖ)gusA. GLV-1h74 contains a non-coding DNA molecule inserted into the F14.5L gene locus in place of (P_{SEL})Ruc-GFP, a non-coding DNA molecule inserted into the TK gene locus in place of (P_{SEL})rTrfR and (P_{7.5k})LacZ, and a non-coding DNA molecule inserted into the HA gene locus in place of (P₁₁ₖ)gusA. GLV-1h85 contains a non-coding DNA molecule inserted into the F14.5L gene locus in place of (P_{SEL})Ruc-GFP, a non-coding DNA molecule inserted into the TK gene locus in place of (P_{SEL})rTrfR and (P_{7.5k})LacZ, and (P₁₁ₖ)gusA inserted into the HA gene locus. GLV-1h86 contains (P_{SEL})Ruc-GFP inserted into the F14.5L gene locus, a non-coding DNA molecule inserted into the TK gene locus in place of (P_{SEL})rTrfR and (P_{7.5k})LacZ, and a non-coding DNA molecule inserted into the HA gene locus in place of (P₁₁ₖ)gusA.

[0154] Other exemplary viruses include, but are not limited to, LIVP viruses that express one or more therapeutic gene products, such as angiogenesis inhibitors (e.g., GLV-1h81, which contains DNA encoding the plasminogen K5 domain (SEQ ID NO: 43) under the control of the vaccinia synthetic early-late promoter in place of the gusA expression cassette at the HA locus in GLV-1h68; GLV-1h104, GLV-1h105 and GLV-1h106, which contain DNA encoding a truncated human tissue factor fused to the αᵥβ₃-integrin RGD binding motif (tTF-RGD) (SEQ ID NO: 93) under the control of a vaccinia synthetic early promoter, vaccinia synthetic early/late promoter or vaccinia synthetic late promoter, respectively, in place of the LacZ/rTFr expression cassette at the TK locus of GLV-1h68; GLV-1h107, GLV-1h108 and GLV-1h109, which contain DNA encoding an anti-VEGF single chain antibody G6 (SEQ ID NO: 99) under the control of a vaccinia synthetic early promoter, vaccinia synthetic early/late promoter or vaccinia synthetic late promoter, respectively, in place of the LacZ/rTFr expression cassette at the TK locus of GLV-1h68) and proteins for tumor growth suppression (e.g., GLV-1h90, GLV-1h91 and GLV-1h92, which express a fusion protein containing an IL-6 fused to an IL-6 receptor (sIL-6R/IL-6) (SEQ ID NO: 106) under the control of a vaccinia synthetic early promoter, vaccinia synthetic early/late promoter or vaccinia synthetic late promoter, respectively, in place of the gusA expression cassette at the HA locus in GLV-1h68; and GLV-1h96, GLV-1h97 and GLV-1h98, which express IL-24 (melanoma differentiation gene, mda-7; SEQ ID NO: 107) under the control of a vaccinia synthetic early promoter, vaccinia synthetic early/late promoter or vaccinia synthetic late promoter, respectively, in place of the Ruc-GFP fusion gene expression cassette at the F14.5L locus of GLV-1h68). Additional therapeutic gene products that can be engineered in the viruses provided herein also are described elsewhere herein.

[0155] Exemplary transporter proteins that can be encoded by the viruses provided herein include, for example, the human norepinephrine transporter (hNET; SEQ ID NO: 142 (cDNA), 141 (protein)) and the human sodium iodide symporter (hNIS; SEQ ID NO: 143 (cDNA), 142 (protein)). Exemplary viruses that can be employed in the methods and use provided herein that encode the human norepinephrine transporter (hNET) include, but are not limited to, GLV-1h99, GLV-1h100, GLV-1h101, GLV-1h139, GLV-1h146, GLV-1h150, GLV-1h151 and GLV-1h152. GLV-1h99 encodes hNET under the control of a vaccinia synthetic early promoter in place of the Ruc-GFP fusion gene expression cassette at the F14.5L locus of GLV-1h68. GLV-1h100, GLV-1h101 encode hNET under the control of a vaccinia synthetic early promoter or vaccinia synthetic late promoter, respectively, in place of the LacZ/rTFr expression cassette at the TK locus of GLV-1h68. GLV-1h39 encodes hNET under the control of a vaccinia synthetic early promoter in place of the gusA expression cassette at the HA locus in GLV-1h68. GLV-1h146 and GLV-1h150, encode hNET under the control of a vaccinia synthetic early promoter or vaccinia synthetic late promoter, respectively, in place of the LacZ/rTFr expression cassette at the TK locus of GLV-1h100 and GLV-101, respectively. Thus, GLV-1h146 and GLV-1h150 encode both hNET and IL-24. Exemplary viruses that can be employed in the methods and use provided herein that encode the human sodium iodide transporter (hNIS) include, but are not limited to, GLV-1h151, GLV-1h151 and GLV-1h153. GLV-1h151, GLV-1h151 and GLV-1h153 encode hNIS under the control of a vaccinia synthetic early promoter, vaccinia synthetic early/late promoter or vaccinia synthetic late promoter, respectively, in place of the gusA expression cassette at the HA locus in GLV-1h68.

[0156] Other exemplary viruses include, but are not limited to, LIVP viruses that encode additional imaging agents such as ferritin and/or a transferrin receptor (e.g., GLV-1h82 and GLV-1h83 which encode E. coli ferritin at the HA locus; GLV-1h82 addition encodes the human transferrin receptor at the TK locus) or a click beetle luciferase-red fluorescent protein fusion protein (e.g., GLV-1h84, which encodes CBG99 and mRFP1 at the TK locus). During translation, the two proteins are cleaved into two individual proteins at picornavirus 2A element (Osborn et al., Mol. Ther. 12: 569-74, 2005). CBG99 produces a more stable luminescent signal than does Renilla luciferase with a half-life of greater than 30 minutes, which makes both in vitro and in vivo assays more convenient. mRFP1 provides improvements in in vivo imaging relative to GFP since mRFP1 can penetrate tissue deeper than GFP.

[0157] b. Other Cytoplasmic Viruses

[0158] Other viruses that can be used in the methods provided herein include cytoplasmic viruses that are not poxviruses. A variety of such cytoplasmic viruses are known in the art, and include African swine flu family viruses and various RNA viruses such as arenaviruses, picornaviruses, caliciviruses, togaviruses, coronaviruses, paramyxoviruses, flaviviruses, reoviruses, and rhaboviruses. Exemplary togaviruses include Sindbis viruses. Exemplary arenaviruses include lymphocytic choriomeningitis virus. Exemplary rhaboviruses include vesicular stomatitis viruses. Exemplary paramyxoviruses include Newcastle Disease viruses and measles viruses. Exemplary picornaviruses include polio viruses, bovine enteroviruses and rhinoviruses. Exemplary flaviviruses include Yellow fever virus; attenuated Yellow fever viruses are known in the art, as exemplified in Barrett et al. (Biologicals 25: 17-25 (1997)), and McAllister et al. (J. Virol. 74: 9197-9205 (2000)).

[0159] Also provided herein are modifications of the viruses provided above to enhance one or more characteristics relative to the wild type virus. Such characteristics can include, but are not limited to, attenuated pathogenicity, reduced toxicity, preferential accumulation in tumor, increased ability to activate an immune response against tumor cells, increased immunogenicity, increased or decreased replication competence, and are able to express exogenous proteins, and combinations thereof. In some embodiments, the modified viruses have an ability to activate an immune response against tumor cells without aggressively killing the tumor cells. In other embodiments, the viruses can be modified to express one or more detectable genes, including genes that can be used for imaging. In other embodiments, the viruses can be modified to express one or more genes for harvesting the gene products and/or for harvesting antibodies against the gene products.

[0160] c. Adenovirus, Herpes, Retroviruses

[0161] Other viruses that can be used in the methods provided herein include viruses that include in their life cycle entry of a nucleic acid molecule into the nucleus of the host cell. A variety of such viruses is known in the art, and includes herpesviruses, papovaviruses, retroviruses, adenoviruses, parvoviruses and orthomyxoviruses. Exemplary herpesviruses include herpes simplex type 1 viruses, cytomegaloviruses, and Epstein-Barr viruses. Exemplary papovaviruses include human papillomavirus and SV40 viruses. Exemplary retroviruses include lentiviruses. Exemplary orthomyxoviruses include influenza viruses. Exemplary parvoviruses include adeno associated viruses.

[0162] 2. Exemplary Stem Cell Compositions

[0163] Exemplary stem cell compositions for use in the methods herein include, but are not limited to, compositions containing embryonic stem cells (ESCs), germinal stem cells, and/or adult stem cells (ASCs). ASCs include, but are not limited to, hematopoietic stems cells (HSCs) from bone marrow, and other primitive progenitor cells such as mesenchymal stem cells (MSCs) and multipotent adult progenitor cells (PAPCs). The stem cells in the stem cell compositions provided herein can be of human origin or non-human origin, including, but not limited to, mouse, rat or non-human primate origin. In one example, the stem cell compositions contain ESCs. For example, exemplary stem cell compositions for use in the methods herein include, but are not limited to, those containing human embryonic stem cells, such as any set forth in Table 1. For example, the stem cell compositions can contain embryonic stem cells selected from among ACT-14, AS034, AS034.1, AS034.2, AS038, AS079, AS094, BG01, BG02, BG03, BG04, CH01, CH02, CLS1, CLS2, CLS3, CLS4, ES01, ES02, ES03, ES04, ES05, ES06, ESM01, ESM02, ESM03, FC018, FES 21, FES 22, FES 29, FES 30, GE01, GE07, GE09, GE13, GE14, GE91, GE92, hES-NCL1, HS181, HS207, HUES1, HUES10, HUES11, HUES12, HUES13, HUES14, HUES15, HUES16, HUES17, HUES2, HUES3, HUES4, HUES5, HUES6, HUES7, HUES8, HUES9, KhES-1, KhES-2, KhES-3, MB01, MB02, MB03, Miz-hES1, Miz-hES10, Miz-hES11, Miz-hES12, Miz-hES13, Miz-hES14, Miz-hES15, Miz-hES2, Miz-hES3, Miz-hES4, Miz-hES5, Miz-hES6, Miz-hES7, Miz-hES8, NC01, NC02, NC03, ReliCellhES1, RH1, RH3, RH4, RH5, RH6, RH7, RL05, RL07, RL10, RL13, RL15, RL20, RL21, Royan H1, SA001, SA002, SA002.5, SA046, SA085, SA111, SA121, SA142, SA167, SA181, SA191, SA196, SA202, SA203, SA211, SA218, SA240, SA279, SA348, SA352, SA399, SA611, SI-100, SI-101, SI-102, SI-103, SI-104, SI-105, SI-106, SI-107, SI-108, SI-109, SI-110, SI-111, SI-114, SI-115, SI-122, SI-123, SI-124, SI-125, SI-126, SI-128, SI-130, SI-131, SI-132, SI-133, SI-134, SI-135, SI-137, SI-138, SI-139, SI-140, SI-141, SI-144, SI-145, SI-146, SI-148, SI-149, SI-15, SI-150, SI-151, SI-153, SI-154, SI-155, SI-156, SI-157, SI-158, SI-159, SI-160, SI-161, SI-162, SI-163, SI-164, SI-165, SI-167, SI-168, SI-169, SI-170, SI-171, SI-172, SI-174, SI-175, SI-176, SI-177, SI-178, SI-179, SI-18, SI-180, SI-182, SI-183, SI-184, SI-185, SI-186, SI-187, SI-188, SI-189, SI-191, SI-192, SI-193, SI-194, SI-195, SI-196, SI-197, SI-198, SI-199, SI-200, SI-201, SI-202, SI-203, SI-204, SI-205, SI-206, SI-208, SI-209, SI-21, SI-210, SI-211, SI-213, SI-214, SI-215, SI-216, SI-217, SI-221, SI-24, SI-27, SI-28, SI-31, SI-33, SI-53, SI-60, SI-62, SI-63, SI-79, SI-80, SI-81, SI-93, SI-94, SI-95, SI-96, SI-97, SI-98, SI-99, SNUhES1, SNUhES2, SNUhES3, TE-03, TE-04, TE-06, TE-07, TE-32, TE-33, TE-62, TE-72, UC01, UC06, VAL-1, VAL-2, VAL-3, VAL-4, WA01, WA07, WA09, WA13 or WA14 cells.

[0164] The stem cell compositions can contain culture adapted stem cells or nonadapted stem cells, and can contain one or more type of stem cell. For example, included among the stem cell compositions for use in the methods are those that contain ESCs from two or more ESC lines, or those that contain ESCs and ASCs. In other examples, the stem cells can be partially differentiated (e.g., derivative stem cells). In some examples, the stem cells of the stem cell composition can be partially differentiated in vitro prior to administration to a subject or prior to contact with the virus, according to known methods in the art for differentiating stem cells. For example, the stem cells can be differentiated for have been differentiated in vitro for 1, 2, 3, 4, 5, 6, 7, 8, 9, 10, 11, 12, 13, 14, 15, 16, 17, 18, 19, 20, 25 or 30 days. The stem cell compositions ca

[0165] 3. Methods of Treatment

[0166] a. Administration of Virus for Prevention of Tumor Formation

[0167] i. Direct Administration of Virus

[0168] Provided are methods of administering a stem cell composition in combination with an oncolytic virus to a subject in need of stem cell therapy. In such methods, administration of the oncolytic virus inhibits tumor formation resulting from the stem cell therapy. In exemplary methods, the virus is administered directly to a subject that is administered a stem cell composition for the treatment of a disease or disorder. The administered virus accumulates in and infects that administered stem cell composition in vivo and can eliminate neoplastic cells or neoplastic progenitor cells of the administered stem cell composition in vivo. The oncolytic virus provided herein can be administered concurrently, sequentially, or intermittently with the stem cell composition. For example, the virus can be administered to the subject following the administration of the stem cell composition, such as, for example, about or 5 minutes, 10 minutes, 15 minutes, 30 minutes, 1 hour, 2 hours, 3 hours, 4 hours, 5 hours, 6 hours, 12 hours, 24 hours, 30 hours, 36 hours, 42 hours, 48 hours, 3 days, 4 days, 5 days, 6 days, 7 days, 8 days, 9 days, 10 days, 11 days, 12 days, 13 days, 14 days, 2 weeks, 3 weeks, 4 weeks, 5 week, 6 weeks or more following the administration of the stem cell composition. The stem cell composition and/or the virus also can be administered multiple times as described herein.

[0169] The virus and the stem cell composition can be administered in the same composition or in separate compositions. The virus and the stem cell composition can be administered via the same route of administration or different routes of administration as provided herein. For example, the stem cell composition and the virus can be administered locally or systemically, together in the same composition or in separate compositions, via the same route of administration or different routes of administration.

[0170] (1) Mode of Administration

[0171] Any mode of administration of a stem cell composition can be employed provided the mode of administration permits the stem cell composition to treat the disease or disorder in the subject for which stem cell therapy is administered. For example, the stem cell composition can be administered intraarterially, intratumorally, endoscopically, intralesionally, intramuscularly, intradermally, intraperitoneally, intravesicularly, intraarticularly, intrapleurally, percutaneously, subcutaneously, orally, parenterally, intranasally, intratracheally, by inhalation, intracranially, intraprostaticaly, intravitreally, ocularly, vaginally, intracoronary, intramyocardially, transendocardially, trans-epicardially, intraspinally, intra-striatumly, transdermally, rectally or sub-epidermally. In some examples, the stem cell composition can be administered locally, by implantation of the stem cell composition at the site for therapy (e.g. at the site of tissue or cell damage). In other examples, the stem cell composition can be administered systemically, such as, for example, by intravenous or parenteral administration. Modes of administration of stem cells are known in the art. One skilled in the art can select any mode of administration compatible with the subject and the disease or disorder to be treated.

[0172] In some exemplary methods, a laminectomy can be performed under general anesthetic to administer the stem cell composition for the treatment of disorders, such as spinal cord injury. In such methods, the injured vertebra and the dura are surgically exposed, and the stem cell composition is injected directly into the damaged tissue. In other exemplary methods, the stem cell compositions can be administered directly into the brain via catheter for treatment of brain injuries such as, for example, stroke. In other exemplary methods, the stem cell composition can be administered by lumbar puncture into the cerebrospinal fluid in patients with neurological diseases such as Alzheimer's or multiple sclerosis. In other exemplary methods, the stem cell composition can be administered by angiography to target organs, such as the liver, heart or pancreas. In such methods, a catheter is inserted into the femoral artery under local anesthetic and guided to the target organ for delivery of the stem cell compositions. Such methods can be employed, for example, for the treatment of diabetes mellitus in order to deliver the stem cells directly to the pancreas, or for patients who have had a cardiac arrest or suffer from cardiac insufficiency (weak heart).

[0173] Any mode of administration of an oncolytic virus to a subject can be used, provided the mode of administration permits the virus to infect neoplastic cells of the administered stem cell composition or tumor cells of the stem cell-derived tumor. Modes of administration can include, but are not limited to, systemic, intravenous, intraperitoneal, subcutaneous, intramuscular, transdermal, intradermal, intra-arterial (e.g., hepatic artery infusion), intravesicular perfusion, intrapleural, intraarticular, topical, intratumoral, intralesional, multipuncture (e.g., as used with smallpox vaccines), inhalation, percutaneous, subcutaneous, intranasal, intratracheal, oral, intracavity (e.g., administering to the bladder via a catheter, administering to the gut by suppository or enema), vaginal, rectal, intracranial, intraprostatic, intravitreal, aural, or ocular administration. One skilled in the art can select any mode of administration compatible with the subject and the virus, and that also is likely to result in the virus reaching stem cell implantation site or stem cell-derived tumor.

[0174] ii Pre-Treatment of Stem Cells for Administration

[0175] Provided are methods of administering a stem cell composition that has been pre-treated with an oncolytic virus for the treatment of a disease or disorder in a subject for which stem cell therapy is administered. In such methods, the stem cell composition to be administered is first contacted with the virusto permit infection of neoplastic cells or neoplastic progenitor cells in the stem cell composition. The virus can preferentially infect and replicate in neoplastic cells and neoplastic progenitor cells and eliminate such cells from the stem cell composition. The virus is added to the stem cell composition at a an appropriate multiplicity of infection (MOI). An appropriate MOI can be selected based on the cell type infected and the virus. Typical MOIs include, but are not limited to, 0.001, 0.01, 0.1, 1, 10 and 100. At a selected time point following infection, the pre-treated stem cell composition is administered to a subject for the treatment of a disease or disorder to be treated by stem cell therapy. The infection time selected should be sufficient to permit infection of the stem cell composition. In some examples, the stem cell composition is contacted with the virus for 1, 2, 3, 4, 5, 6, 7, 8, 9, 10, 11, 12, 18, 24, 30, 36, 42, 48, or 72 hours or more prior to administration of the pretreated stem cell composition.

[0176] Any mode of administration of a stem cell composition can be employed to administer a pre-treated stem cell composition provided the mode of administration permits the stem cell composition to treat the disease or disorder. Exemplary modes of administration of a stem composition are provided elsewhere herein.

[0177] iii. Administration of Virus for Treatment of a Stem Cell-Derived Tumor

[0178] Provided are methods of administering an oncolytic virus for the treatment of a subject having a tumor resulting from stem cell therapy. In such methods, a subject selected for administration of the virus is one who has been diagnosed as having a tumor following administration of a stem cell therapy. Such tumors are typically are derived from the stem cell compositions that are administered for therapy. In some examples, as described herein, a virus, such as the viruses described herein, can be employed for detection and imaging of the stem cell-derived tumor in a subject suspected of having a tumor and also can be employed for the treatment of the tumor. In addition, as described herein, such viruses can be employed for the monitoring of treatment of the tumor.

[0179] Any mode of administration of an oncolytic virus to a subject can be used, provided the mode of administration permits the virus to infect tumor cells of the stem cell-derived tumor. Exemplary modes of administration of a virus to a subject are provided elsewhere herein.

[0180] b. Virus Dosages

[0181] The dosage regimen for administering an oncolytic virus can be any of a variety of methods and amounts, and can be determined by one skilled in the art according to known clinical factors. As is known in the medical arts, dosages for any one patient can depend on many factors, including the subject's species, size, body surface area, age, sex, immunocompetence, and general health, the particular virus to be administered, duration and route of administration, the kind and stage of the disease, for example, tumor size, and other treatments or compounds, such as chemotherapeutic drugs, being administered concurrently. In addition to the above factors, such levels can be affected by the infectivity of the virus, and the nature of the virus, as can be determined by one skilled in the art. In the present methods, appropriate minimum dosage levels of viruses can be levels sufficient for the virus to survive, grow and replicate in a neoplastic cells or neoplastic progenitor cells of a stem-cell composition or stem-cell derived tumor. Exemplary minimum levels for administering a virus to a 65 kg human can include at least or about 1×10⁵ plaque forming units (PFU), at least or about 5×10⁵ PFU, at least or about 1×10⁶ PFU, at least or about 5×10⁶ PFU, at least or about 1×10⁷ PFU, at least or about 5×10⁷ PFU, at least or about 1×10⁸ PFU, at least or about 5×10⁸ PFU, at least or about 1×10⁹ PFU, at least or about 5×10⁹ PFU, at least or about 1×10¹⁰ PFU or at least or about 5×10¹⁰ PFU. In the present methods, appropriate maximum dosage levels of viruses can be levels that are not toxic to the host, levels that do not cause splenomegaly of 3 times or more, levels that do not result in colonies or plaques in normal tissues or organs after about 1 day or after about 3 days or after about 7 days. Exemplary maximum levels for administering a virus to a 65 kg human can include no more than about 1×10¹¹ PFU, no more than about 5×10¹⁰ PFU, no more than about 1×10¹⁰ PFU, no more than about 5×10⁹ PFU, no more than about 1×10⁹ PFU, or no more than about 1×10⁸ PFU.

[0182] c. Number of Administrations

[0183] The methods provided herein can include a single administration of a virus to a subject or multiple administrations of a virus to a subject. In some embodiments, a single administration is sufficient to establish a virus in a stem cell implant or stem cell-derived tumor, where the virus can proliferate and can cause or enhance an anti-neoplastic or an anti-tumor response in the subject; such methods do not require additional administrations of a virus in order to cause or enhance an anti-neoplastic or an anti-tumor response in a subject, which can result, for example in elimination of neoplastic cells from the implanted stem cell composition, inhibition of growth of a stem cell-derived tumor, inhibition of metastasis growth or formation from a stem cell-derived tumor, reduction in tumor or size, elimination of a tumor or metastasis, inhibition or prevention of recurrence of a neoplastic disease or new tumor formation, or other cancer therapeutic effects.

[0184] In other examples, a virus can be administered on different occasions, separated in time typically by at least one day. Separate administrations can increase the likelihood of delivering a virus to a stem cell implant or stem cell derived-tumor, where a previous administration has been ineffective in delivering a virus to the stem cell implant or stem cell derived-tumor. Separate administrations can increase the locations on stem cell derived-tumor where virus proliferation can occur or can otherwise increase the titer of virus accumulated in the stem cell implant or stem cell derived-tumor, which can increase the scale of release of antigens or other compounds from the tumor cells in eliciting or enhancing a host's anti-tumor immune response, and also can, optionally, increase the level of virus-based tumor lysis or tumor cell death. Separate administrations of a virus can further extend a subject's immune response against viral antigens, which can extend the host's immune response to tumors or metastases in which viruses have accumulated, and can increase the likelihood of a host mounting an anti-neoplastic or anti-tumor immune response.

[0185] When separate administrations are performed, each administration can be a dosage amount that is the same or different relative to other administration dosage amounts. In one embodiment, all administration dosage amounts are the same. In other embodiments, a first dosage amount can be a larger dosage amount than one or more subsequent dosage amounts, for example, at least 10× larger, at least 100× larger, or at least 1000× larger than subsequent dosage amounts. In one example of a method of separate administrations in which the first dosage amount is greater than one or more subsequent dosage amounts, all subsequent dosage amounts can be the same, smaller amount relative to the first administration.

[0186] Separate administrations can include any number of two or more administrations, including two, three, four, five or six administrations. One skilled in the art can readily determine the number of administrations to perform or the desirability of performing one or more additional administrations according to methods known in the art for monitoring therapeutic methods and other monitoring methods provided herein. Accordingly, the methods provided herein include methods of providing to the subject one or more administrations of a virus, where the number of administrations can be determined by monitoring the subject, and, based on the results of the monitoring, determining whether or not to provide one or more additional administrations. Deciding on whether or not to provide one or more additional administrations can be based on a variety of monitoring results, including, but not limited to, indication of elimination or neoplastic cells in the stem cell composition, tumor growth or inhibition of tumor growth, appearance of new metastases or inhibition of metastasis, the subject's anti-virus antibody titer, the subject's anti-tumor antibody titer, the overall health of the subject, the weight of the subject, the presence of virus solely in tumor and/or metastases, the presence of virus in normal tissues or organs.

[0187] The time period between administrations can be any of a variety of time periods. The time period between administrations can be a function of any of a variety of factors, including monitoring steps, as described in relation to the number of administrations, the time period for a subject to mount an immune response, the time period for a subject to clear the virus from normal tissue, or the time period for virus proliferation in the tumor or metastasis. In one example, the time period can be a function of the time period for a subject to mount an immune response; for example, the time period can be more than the time period for a subject to mount an immune response, such as more than about one week, more than about ten days, more than about two weeks, or more than about a month; in another example, the time period can be less than the time period for a subject to mount an immune response, such as less than about one week, less than about ten days, less than about two weeks, or less than about a month. In another example, the time period can be a function of the time period for a subject to clear the virus from normal tissue; for example, the time period can be more than the time period for a subject to clear the virus from normal tissue, such as more than about a day, more than about two days, more than about three days, more than about five days, or more than about a week. In another example, the time period can be a function of the time period for virus proliferation in the tumor or metastasis; for example, the time period can be more than the amount of time for a detectable signal to arise in a tumor or metastasis after administration of a virus expressing a detectable marker, such as about 3 days, about 5 days, about a week, about ten days, about two weeks, or about a month.

[0188] d. Steps Prior to Administration of the Virus

[0189] In some examples, one or more steps can be performed prior to administration of the virus to the subject. Any of a variety of preceding steps can be performed depending on whether the virus is administered for the prevention of a stem cell-derived tumor or is administered for the treatment of a patient having a stem cell-derived tumor, including, but not limited to diagnosing the subject with a condition appropriate for virus administration, determining the immunocompetence of the subject, immunizing the subject, treating the subject with a chemotherapeutic agent, treating the subject with radiation, or surgically treating the subject. Diagnostic methods can include determining the type of neoplastic condition, determining the stage of the neoplastic condition, determining the size of one or more tumors in the subject, determining the presence or absence of metastatic or neoplastic cells in the lymph nodes of the subject, or determining the presence of metastases of the subject. In some examples, prior to administering to the subject a virus, the immunocompetence of the subject can be determined to ensure that the subject is able to clear the virus from non-tumorous tissues or can mount an immune response against a tumor. The methods of administering a virus to a subject provided herein can include causing or enhancing an immune response in a subject. Accordingly, prior to administering a virus to a subject, the ability of a subject to mount an immune response can be determined. Any of a variety of tests of immunocompetence known in the art can be performed in the methods provided herein. Exemplary immunocompetence tests can examine ABO hemagglutination titers (IgM), leukocyte adhesion deficiency (LAD), granulocyte function (NBT), T and B cell quantitation, tetanus antibody titers, salivary IgA, skin test, tonsil test, complement C3 levels, and factor B levels, and lymphocyte count. One skilled in the art can determine the desirability to administer a virus to a subject according to the level of immunocompetence of the subject, according to the immunogenicity of the virus, and, optionally, according to the immunogenicity of the neoplastic disease to be treated. Typically, a subject can be considered immunocompetent if the skilled artisan can determine that the subject is sufficiently competent to mount an immune response against the virus.

[0190] In some examples, the subject can be immunized prior to administering to the subject a virus according to the methods provided herein. Immunization can serve to increase the ability of a subject to mount an immune response against the virus, or increase the speed at which the subject can mount an immune response against a virus. Immunization also can serve to decrease the risk to the subject of pathogenicity of the virus. In some embodiments, the immunization can be performed with an immunization virus that is similar to the oncolytic virus to be administered. For example, the immunization virus can be a replication-incompetent variant of the oncolytic virus. In other embodiments, the immunization material can be digests of the oncolytic virus to be administered. Any of a variety of methods for immunizing a subject against a known virus are known in the art and can be used herein. In one example, vaccinia viruses treated with, for example, 1 microgram of psoralen and ultraviolet light at 365 nm for 4 minutes, can be rendered replication incompetent. In another embodiment, the virus can be selected as the same or similar to a virus against which the subject has been previously immunized, e.g., in a childhood vaccination.

[0191] In some examples, prior to administration of a virus to a subject having a stem cell-derived tumor, the subject can be treated in one or more cancer treatment steps, including but not limited to administering a compound that decreases the rate of proliferation of the tumor or neoplastic cells without weakening the immune system (e.g., by administering tumor suppressor compounds or by administering tumor cell-specific compounds) or administering an angiogenesis-inhibiting compound. Thus, combined methods that include administering a virus to a subject can further improve cancer therapy. Thus, provided herein are methods of administering a virus to a subject, along with prior to or subsequent to, for example, administering a compound that slows tumor growth without weakening the subject's immune system or a compound that inhibits vascularization of the tumor.

[0192] 4. Co-Administrations

[0193] Provided are methods for the treatment of a stem cell-derived tumor in which an additional therapeutic substance, such as a different oncolytic virus or a therapeutic compound is administered. These can be administered simultaneously, sequentially or intermittently with the first virus. The additional therapeutic substance can interact with the virus or a gene product thereof, or the additional therapeutic substance can act independently of the virus.

[0194] Combination therapy treatment has advantages in that: 1) it avoids single agent resistance; 2) in a heterogeneous tumor population, it can kill cells by different mechanisms; and 3) by selecting drugs with non-overlapping toxicities, each agent can be used at full dose to elicit maximal efficacy and synergistic effect. Combination therapy can be done by combining a diagnostic/oncolytic virus with one or more of the following anti-cancer agents: chemotherapeutic agents, therapeutic antibodies, siRNAs, toxins, enzyme-prodrug pairs or radiation.

[0195] a. Administering a Plurality of Viruses

[0196] Methods are provided for administering to a subject two or more viruses. Administration can be effected simultaneously, sequentially or intermittently. The plurality of viruses can be administered as a single composition or as two or more compositions. The two or more viruses can include at least two viruses. In some examples, where there are two viruses, both viruses are vaccinia viruses. In another example, one virus is a vaccinia virus and the second viruses is any one of an adenovirus, an adeno-associated virus, a retrovirus, a herpes simplex virus, a reovirus, a mumps virus, a foamy virus, an influenza virus, a myxoma virus, a vesicular stomatitis virus, or any other virus described herein or known in the art. Viruses can be chosen based on the pathway on which they act. For example, a virus that targets an activated Ras pathway can be combined with a virus that targets tumor cells defective in p53 expression.

[0197] The plurality of viruses can be provided as combinations of compositions and/or as kits that include the viruses packaged for administration and optionally including instructions therefore. Such combinations also can include stem cell compositions for therapy. The compositions can contain the viruses formulated for single dosage administration (i.e., for direct administration) or multiple dosage formulation (e.g., for multiple direct administrations), and can require dilution or other additions.

[0198] The viruses can be administered at approximately the same time, or can be administered at different times. The viruses can be administered in the same composition or in the same administration method, or can be administered in separate composition or by different administration methods. The time period between administrations can be any time period that achieves the desired effects, as can be determined by one skilled in the art. Selection of a time period between administrations of different viruses can be determined according to parameters similar to those for selecting the time period between administrations of the same virus, including results from monitoring steps, the time period for a subject to mount an immune response, the time period for a subject to clear virus from normal tissue, or the time period for virus proliferation in the tumor or metastasis. In one example, the time period can be a function of the time period for a subject to mount an immune response; for example, the time period can be more than the time period for a subject to mount an immune response, such as more than about one week, more than about ten days, more than about two weeks, or more than about a month; in another example, the time period can be less than the time period for a subject to mount an immune response, such as less than about one week, less than about ten days, less than about two weeks, or less than about a month. In another example, the time period can be a function of the time period for a subject to clear the virus from normal tissue; for example, the time period can be more than the time period for a subject to clear the virus from normal tissue, such as more than about a day, more than about two days, more than about three days, more than about five days, or more than about a week. In another example, the time period can be a function of the time period for virus proliferation in the tumor or metastasis; for example, the time period can be more than the amount of time for a detectable signal to arise in a tumor or metastasis after administration of a virus expressing a detectable marker, such as about 3 days, about 5 days, about a week, about ten days, about two weeks, or about a month.

[0199] b. Therapeutic Compounds

[0200] Any therapeutic or anti-cancer agent can be used as the second, therapeutic or anti-cancer agent in the combined treatment methods for a stem cell-derived tumor provided herein. The methods can include administering one or more therapeutic compounds to the subject in addition to administering a virus or plurality thereof to a subject having a tumor resulting from a stem cell therapy. Therapeutic compounds can act independently, or in conjunction with the virus, for tumor therapeutic effects.

[0201] Therapeutic compounds that can act independently include any of a variety of known chemotherapeutic compounds that can inhibit tumor growth, inhibit metastasis growth and/or formation, decrease the size of a tumor or metastasis, eliminate a tumor or metastasis, without reducing the ability of a virus to accumulate in a tumor, replicate in the tumor, and cause or enhance an anti-tumor immune response in the subject.

[0202] Therapeutic compounds that act in conjunction with the viruses include, for example, compounds that alter the expression of the viruses or compounds that can interact with a virally-expressed gene, or compounds that can inhibit virus proliferation, including compounds toxic to the virus. Therapeutic compounds that can act in conjunction with the virus include, for example, therapeutic compounds that increase the proliferation, toxicity, tumor cell killing or immune response eliciting properties of a virus, and also can include, for example, therapeutic compounds that decrease the proliferation, toxicity or cell killing properties of a virus. Optionally, the therapeutic agent can exhibit or manifest additional properties, such as, properties that permit its use as an imaging agent, as described elsewhere herein.

[0203] Therapeutic compounds also include, but are not limited to, chemotherapeutic agents, nanoparticles, radiation therapy, siRNA molecules, enzyme/pro-drug pairs, photosensitizing agents, toxins, microwaves, a radionuclide, an angiogenesis inhibitor, a mitosis inhibitor protein (e.g., cdc6), an antitumor oligopeptide (e.g., antimitotic oligopeptides, high affinity tumor-selective binding peptides), a signaling modulator, anti-cancer antibiotics, or a combination thereof.

[0204] Exemplary photosensitizing agents include, but are not limited to, for example, indocyanine green, toluidine blue, aminolevulinic acid, texaphyrins, benzoporphyrins, phenothiazines, phthalocyanines, porphyrins such as sodium porfimer, chlorins such as tetra(m-hydroxyphenyl)chlorin or tin(IV) chlorin e6, purpurins such as tin ethyl etiopurpurin, purpurinimides, bacteriochlorins, pheophorbides, pyropheophorbides or cationic dyes. In one embodiment, a vaccinia virus, such as a vaccinia virus provided herein, is administered to a subject having a tumor, cancer or metastasis in combination with a photosensitizing agent.

[0205] Radionuclides, which depending up the radionuclide, amount and application can be used for diagnosis and/or for treatment. They include, but are not limited to, for example, a compound or molecule containing ³²Phosphate, ⁶⁰Cobalt, ⁹⁰Yttirum, ⁹⁹Technicium, ¹⁰³Palladium, ¹⁰⁶Ruthenium, ¹¹¹Indium, ¹¹⁷Lutetium, ¹²⁵Iodine, ¹³¹Iodine, ¹³⁷Cesium, ¹⁵³Samarium, ¹⁸⁶Rhenium, ¹⁸⁸Rhenium, ¹⁹²Iridium, ¹⁹⁸Gold, ²¹¹Astatine, ²¹²Bismuth or ²¹³Bismuth. In one embodiment, a vaccinia virus, such as a vaccinia virus provided herein, is administered to a subject having a tumor, cancer or metastasis in combination with a radionuclide.

[0206] Toxins include, but are not limited to, chemotherapeutic compounds such as, but not limited to, 5-fluorouridine, calicheamicin and maytansine. Signaling modulators include, but are not limited to, for example, inhibitors of macrophage inhibitory factor, toll-like receptor agonists and stat 3 inhibitors. In one embodiment, a vaccinia virus, such as a vaccinia virus provided herein, is administered to a subject having a tumor, cancer or metastasis in combination with a toxin or a signaling modulator.

[0207] Combination therapy between chemotherapeutic agents and oncolytic viruses can be effective/curative in situations when single agent treatment is not effective. Chemotherapeutic compounds include, but are not limited to, alkylating agents such as thiotepa and cyclosphosphamide; alkyl sulfonates such as busulfan, improsulfan and piposulfan; aziridines such as benzodopa, carboquone, meturedopa and uredopa; ethylenimines and methylamelamines including altretamine, triethylenemelamine, trietylenephosphoramide, triethylenethiophosphaoramide and trimethylolomelamime nitrogen mustards such as chiorambucil, chlornaphazine, cholophosphamide, estramustine, ifosfamide, mechlorethamine, mechlorethamine oxide hydrochloride, melphalan, novembichin, phenesterine, prednimustine, trofosfamide, uracil mustard; nitrosureas such as carmustine, chlorozotocin, fotemustine, lomustine, nimustine, ranimustine; antibiotics such as aclacinomysins, actinomycin, authramycin, azaserine, bleomycins, cactinomycin, calicheamicin, carabicin, caminomycin, carzinophilin, chromomycins, dactinomycin, daunorubicin, detorubicin, 6-diazo-5-oxo-L-norleucine, doxorubicin, epirubicin, esorubicin, idarubicin, marcellomycin, mitomycins, mycophenolic acid, nogalamycin, olivomycins, peplomycin, potfiromycin, puromycin, quelamycin, rodorubicin, streptonigrin, streptozocin, tubercidin, ubenimex, zinostatin, zorubicin; anti-metabolites such as methotrexate and 5-fluorouracil (5-FU); folic acid analogues such as denopterin, methotrexate, pteropterin, trimetrexate; purine analogs such as fludarabine, 6-mercaptopurine, thiamiprine, thioguanine; pyrimidine analogs such as ancitabine, azacitidine, 6-azauridine, carmofur, cytarabine, dideoxyuridine, doxifluridine, enocitabine, floxuridine; androgens such as calusterone, dromostanolone propionate, epitiostanol, mepitiostane, testolactone; anti-adrenals such as aminoglutethimide, mitotane, trilostane; folic acid replenisher such as frolinic acid; aceglatone; aldophosphamide glycoside; aminolevulinic acid; amsacrine; bestrabucil; bisantrene; edatraxate; defofamine; demecolcine; diaziquone; elformithine; elliptinium acetate; etoglucid; gallium nitrate; hydroxyurea; lentinan; lonidamine; mitoguazone; mitoxantrone; mopidamol; nitracrine; pentostatin; phenamet; pirarubicin; podophyllinic acid; 2-ethylhydrazide; procarbazine; polysaccharide-K; razoxane; sizofiran; spirogermanium; tenuazonic acid; triaziquone; 2,2′,2″-trichlorotriethylamine; urethan; vindesine; dacarbazine; mannomustine; mitobronitol; mitolactol; pipobroman; gacytosine; cytosine arabinoside; cyclophosphamide; thiotepa; taxoids, e.g., paclitaxel and doxetaxel; chlorambucil; gemcitabine; 6-thioguanine; mercaptopurine; methotrexate; platinum analogs such as cisplatin and carboplatin; vinblastine; platinum; etoposide (VP-16); ifosfamide; mitomycin C; mitoxantrone; vincristine; vinorelbine; navelbine; novantrone; teniposide; daunomycin; aminopterin; xeloda; ibandronate; CPT11; topoisomerase inhibitor RFS 2000; difluoromethylornithine (DMFO); retinoic acid; esperamicins; capecitabine; and pharmaceutically acceptable salts, acids or derivatives of any of the above. Also included are anti-hormonal agents that act to regulate or inhibit hormone action on tumors such as anti-estrogens including for example tamoxifen, raloxifene, aromatase inhibiting 4(5)-imidazoles, 4-hydroxytamoxifen, trioxifene, keoxifene, LY117018, onapristone and toremifene (Fareston); and antiandrogens such as flutamide, nilutamide, bicalutamide, leuprolide and goserelin; and pharmaceutically acceptable salts, acids or derivatives of any of the above. Such chemotherapeutic compounds that can be used herein include compounds whose toxicities preclude use of the compound in general systemic chemotherapeutic methods. Chemotherapeutic agents also include new classes of targeted chemotherapeutic agents such as, for example, imatinib (sold by Novartis under the trade name Gleevec in the United States), gefitinib (developed by Astra Zeneca under the trade name Iressa) and erlotinib. Particular chemotherapeutic agents include, but are not limited to, cisplatin, carboplatin, oxaliplatin, DWA2114R, NK121, IS 3 295, and 254-S vincristine, prednisone, doxorubicin and L-asparaginase; mechoroethamine, vincristine, procarbazine and prednisone (MOPP), cyclophosphamide, vincristine, procarbazine and prednisone (C-MOPP), bleomycin, vinblastine, gemcitabine and 5-fluorouracil. Exemplary chemotherapeutic agents are, for example, cisplatin, carboplatin, oxaliplatin, DWA2114R, NK121, IS 3 295, and 254-S. In a non-limiting embodiment, a vaccinia virus, such as a vaccinia virus provided herein, is administered to a subject having a tumor, cancer or metastasis in combination with a platinum coordination complex, such as cisplatin, carboplatin, oxaliplatin, DWA2114R, NK121, IS 3 295, and 254-S. Tumors, cancers and metastasis can be any of those provided herein, and in particular, can be a pancreatic tumor, an ovarian tumor, a lung tumor, a colon tumor, a prostate tumor, a cervical tumor or a breast tumor; exemplary tumors are pancreatic and ovarian tumors. Tumors, cancers and metastasis can be a monotherapy-resistant tumor such as, for example, one that does not respond to therapy with virus alone or anti-cancer agent alone, but that does respond to therapy with a combination of virus and anti-cancer agent. Typically, a therapeutically effective amount of virus is systemically administered to the subject and the virus localizes and accumulates in the tumor. Subsequent to administering the virus, the subject is administered a therapeutically effective amount of an anti-cancer agent, such as cisplatin. In one example, cisplatin is administered once-daily for five consecutive days. One of skill in the art could determine when to administer the anti-cancer agent subsequent to the virus using, for example, in vivo animal models. Using the methods provided herein, administration of a virus and anti-cancer agent, such as cisplatin can cause a reduction in tumor volume, can cause tumor growth to stop or be delayed or can cause the tumor to be eliminated from the subject. The status of tumors, cancers and metastasis following treatment can be monitored using any of the methods provided herein and known in the art.

[0208] Exemplary anti-cancer antibiotics include, but are not limited to, anthracyclines such as doxorubicin hydrochloride (adriamycin), idarubicin hydrochloride, daunorubicin hydrochloride, aclarubicin hydrochloride, epirubicin hydrochloride and purarubicin hydrochloride, pleomycins such as pleomycin and peplomycin sulfate, mitomycins such as mitomycin C, actinomycins such as actinomycin D, zinostatinstimalamer and polypeptides such as neocarzinostatin. In one embodiment, a vaccinia virus, such as a vaccinia virus provided herein, is administered to a subject having a tumor, cancer or metastasis in combination with an anti-cancer antibiotic.

[0209] In one embodiment, nanoparticles can be designed such that they carry one or more therapeutic agents provided herein. Additionally, nanoparticles can be designed to carry a molecule that targets the nanoparticle to the tumor cells. In one non-limiting example, nanoparticles can be coated with a radionuclide and, optionally, an antibody immunoreactive with a tumor-associated antigen. In one embodiment, a vaccinia virus, such as a vaccinia virus provided herein, is administered to a subject having a tumor, cancer or metastasis in combination with a nanoparticle carrying any of the therapeutic agents provided herein.

[0210] Radiation therapy has become a foremost choice of treatment for a majority of cancer patients. The wide use of radiation treatment stems from the ability of gamma-irradiation to induce irreversible damage in targeted cells with the preservation of normal tissue function. Ionizing radiation triggers apoptosis, the intrinsic cellular death machinery in cancer cells, and the activation of apoptosis seems to be the principal mode by which cancer cells die following exposure to ionizing radiation. In one embodiment, a vaccinia virus, such as a vaccinia virus provided herein, is administered to a subject having a tumor, cancer or metastasis in combination with radiation therapy.

[0211] Thus, provided herein are methods of administering to a subject one or more therapeutic compounds that can act in conjunction with the virus to increase the proliferation, toxicity, tumor cell killing, or immune response eliciting properties of a virus. Also provided herein are methods of administering to a subject one or more therapeutic compounds that can act in conjunction with the virus to decrease the proliferation, toxicity, or cell killing properties of a virus. Therapeutic compounds to be administered can be any of those provided herein or in the art.

[0212] Therapeutic compounds that can act in conjunction with the virus to increase the proliferation, toxicity, tumor cell killing or immune response eliciting properties of a virus are compounds that can alter gene expression, where the altered gene expression can result in an increased killing of tumor cells or an increased anti-tumor immune response in the subject. A gene expression-altering compound can, for example, cause an increase or decrease in expression of one or more viral genes, including endogenous viral genes and/or exogenous viral genes. For example, a gene expression-altering compound can induce or increase transcription of a gene in a virus such as an exogenous gene that can cause cell lysis or cell death, that can provoke an immune response, that can catalyze conversion of a prodrug-like compound, or that can inhibit expression of a tumor cell gene. Any of a wide variety of compounds that can alter gene expression are known in the art, including IPTG and RU486. Exemplary genes whose expression can be up-regulated include proteins and RNA molecules, including toxins, enzymes that can convert a prodrug to an anti-tumor drug, cytokines, transcription regulating proteins, siRNA and ribozymes. In another example, a gene expression-altering compound can inhibit or decrease transcription of a gene in a virus such as a heterologous gene that can reduce viral toxicity or reduces viral proliferation. Any of a variety of compounds that can reduce or inhibit gene expression can be used in the methods provided herein, including siRNA compounds, transcriptional inhibitors or inhibitors of transcriptional activators. Exemplary genes whose expression can be down-regulated include proteins and RNA molecules, including viral proteins or RNA that suppress lysis, nucleotide synthesis or proliferation, and cellular proteins or RNA molecules that suppress cell death, immunoreactivity, lysis, or viral replication.

[0213] In another embodiment, therapeutic compounds that can act in conjunction with the virus to increase the proliferation, toxicity, tumor cell killing, or immune response eliciting properties of a virus are compounds that can interact with a virally expressed gene product, and such interaction can result in an increased killing of tumor cells or an increased anti-tumor immune response in the subject. A therapeutic compound that can interact with a virally-expressed gene product can include, for example a prodrug or other compound that has little or no toxicity or other biological activity in its subject-administered form, but after interaction with a virally expressed gene product, the compound can develop a property that results in tumor cell death, including but not limited to, cytotoxicity, ability to induce apoptosis, or ability to trigger an immune response. In one non-limiting example, the virus carries an enzyme into the cancer cells. Once the enzyme is introduced into the cancer cells, an inactive form of a chemotherapy drug (i.e., a prodrug) is administered. When the inactive prodrug reaches the cancer cells, the enzyme converts the prodrug into the active chemotherapy drug, so that it can kill the cancer cell. Thus, the treatment is targeted only to cancer cells and does not affect normal cells. The prodrug can be administered concurrently with, or sequentially to, the virus. A variety of prodrug-like substances are known in the art and an exemplary set of such compounds are disclosed elsewhere herein, where such compounds can include gancyclovir, 5-fluorouracil, 6-methylpurine deoxyriboside, cephalosporin-doxorubicin, 4-[(2-chloroethyl)(2-mesuloxyethyl)amino]benzoyl-L-glutamic acid, acetaminophen, indole-3-acetic acid, CB1954, 7-ethyl-10-[4-(1-piperidino)-1-piperidino]carbonyloxycamptothecin, bis-(2-chloroethyl)amino-4-hydroxyphenyl-aminomethanone 28, 1-chloromethyl-5-hydroxy-1,2-dihyro-3H-benz[e]indole, epirubicin-glucuronide, 5′-deoxy-5-fluorouridine, cytosine arabinoside, linamarin, and a nucleoside analogue (e.g., fluorouridine, fluorodeoxyuridine, fluorouridine arabinoside, cytosine arabinoside, adenine arabinoside, guanine arabinoside, hypoxanthine arabinoside, 6-mercaptopurineriboside, theoguanosine riboside, nebularine, 5-iodouridine, 5-iododeoxyuridine, 5-bromodeoxyuridine, 5-vinyldeoxyuridine, 9-[(2-hydroxy)ethoxy]methylguanine (acyclovir), 9-[(2-hydroxy-1-hydroxymethyl)-ethoxy]methylguanine (DHPG), azauridien, azacytidine, azidothymidine, dideoxyadenosine, dideoxycytidine, dideoxyinosine, dideoxyguanosine, dideoxythymidine, 3′-deoxyadenosine, 3′-deoxycytidine, 3′-deoxyinosine, 3′-deoxyguanosine, 3′-deoxythymidine).

[0214] In another embodiment, therapeutic compounds that can act in conjunction with the virus to decrease the proliferation, toxicity or cell killing properties of a virus are compounds that can inhibit viral replication, inhibit viral toxins or cause viral death. A therapeutic compound that can inhibit viral replication, inhibit viral toxins, or cause viral death can generally include a compound that can block one or more steps in the viral life cycle, including, but not limited to, compounds that can inhibit viral DNA replication, viral RNA transcription, viral coat protein assembly, outer membrane or polysaccharide assembly. Any of a variety of compounds that can block one or more steps in a viral life cycle are known in the art, including any known antiviral compound (e.g., cidofovir), viral DNA polymerase inhibitors, viral RNA polymerase inhibitors, inhibitors of proteins that regulate viral DNA replication or RNA transcription. In another example, a virus can contain a gene encoding a viral life cycle protein, such as DNA polymerase or RNA polymerase that can be inhibited by a compound that is, optionally, non-toxic to the host organism.

[0215] In addition to combination therapy between chemotherapeutic agents and a virus provided herein, other more complex combination therapy strategies could be applied as well. For example, a combination therapy can include chemotherapeutic agents, therapeutic antibodies, and a virus provided herein. Alternatively, another combination therapy can be the combination of radiation, therapeutic antibodies, and a virus provided herein. Therefore, the concept of combination therapy also can be based on the application of a virus provided herein virus along with one or more of the following therapeutic modalities, namely, chemotherapeutic agents, radiation therapy, therapeutic antibodies, hyper- or hypothermia therapy, siRNA, diagnostic/therapeutic bacteria, diagnostic/therapeutic mammalian cells, immunotherapy, and/or targeted toxins (delivered by antibodies, liposomes and nanoparticles).

[0216] Effective delivery of each components of the combination therapy is an important aspect of the methods provided herein. In accordance with one aspect, the modes of administration discussed below exploit one of more of the key features: (i) delivery of a virus provided herein to the tumors by a mode of administration effect to achieve highest titer of virus and highest therapeutic effect; (ii) delivery of any other mentioned therapeutic modalities to the tumor by a mode of administration to achieve the optimal therapeutic effect. The dose scheme of the combination therapy administered is such that the combination of the two or more therapeutic modalities is therapeutically effective. Dosages will vary in accordance with such factors as the age, health, sex, size and weight of the patient, the route of administration, the toxicity of the drugs, frequency of treatment and the relative susceptibilities of the cancer to each of the therapeutic modalities.

[0217] For combination therapies with chemotherapeutic compounds, dosages for the administration of such compounds are known in the art or can be determined by one skilled in the art according to known clinical factors (e.g., subject's species, size, body surface area, age, sex, immunocompetence, and general health, duration and route of administration, the kind and stage of the disease, for example, tumor size, and other viruses, treatments, or compounds, such as other chemotherapeutic drugs, being administered concurrently). In addition to the above factors, such levels can be affected by the infectivity of the virus, and the nature of the virus, as can be determined by one skilled in the art. For example, Cisplatin (also called cis-platinum, platinol; cis-diamminedichloroplatinum; and cDDP) is representative of a broad class of water-soluble, platinum coordination compounds frequently employed in the therapy of testicular cancer, ovarian tumors and a variety of other cancers. (See, e.g., Blumenreich et al. Cancer 55(5): 1118-1122 (1985); Forastiere et al. J. Clin. Oncol. 19(4): 1088-1095 (2001)). Methods of employing cisplatin clinically are well known in the art. For example, cisplatin has been administered in a single day over a six hour period, once per month, by slow intravenous infusion. For localized lesions, cisplatin can be administered by local injection. Intraperitoneal infusion can also be employed. Cisplatin can be administered in doses as low as 10 mg/m2 per treatment if part of a multi-drug regimen, or if the patient has an adverse reaction to higher dosing. In general, a clinical dose is from about 30 to about 120 or 150 mg/m2 per treatment.

[0218] Typically, platinum-containing chemotherapeutic agents are administered parenterally, for example by slow intravenous infusion, or by local injection, as discussed above. The effects of intralesional (intra-tumoral) and IP administration of cisplatin is described in (Nagase et al. Cancer Treat. Rep. 71(9): 825-829 (1987); and Theon et al. J. Am. Vet. Med. Assoc. 202(2): 261-7. (1993)).

[0219] In one exemplary embodiment, the mutant vaccinia virus is administered once or 2-4 times with 0-60 days apart, followed by 1-30 days where no anti-cancer treatment, then cisplatin is administered daily for 1-5 days, followed by 1-30 days where no anti-cancer treatment is administered. Each component of the therapy, virus or cisplatin treatment, or the virus and cisplatin combination therapy can be repeated. In another exemplary embodiment, cisplatin is administered daily for 1 to 5 days, followed by 1-10 days where no anti-cancer treatment is administered, then the mutant vaccinia virus is administered once or 2-4 times with 0-60 days apart. Such treatment scheme can be repeated. In another exemplary embodiment, cisplatin is administered daily for 1 to 5 days, followed by 1-10 days where no anti-cancer treatment is administered, then the mutant vaccinia virus is administered once or 2-4 times with 0-60 days apart. This is followed by 5-60 days where no anti-cancer treatment is administered, then cisplatin is administered again for 1-5 days. Such treatment scheme can be repeated.

[0220] Gemcitabine (GEMZAR®) is another compound employed in the therapy of breast cancer, non-small cell lung cancer, and pancreatic cancer. Gemcitabine is a nucleoside analogue that exhibits antitumor activity. Methods of employing gemcitabine clinically are well known in the art. For example, gemcitabine has been administered by intravenous infusion at a dose of 1000 mg/m2 over 30 minutes once weekly for up to 7 weeks (or until toxicity necessitates reducing or holding a dose), followed by a week of rest from treatment of pancreatic cancer. Subsequent cycles can consist of infusions once weekly for 3 consecutive weeks out of every 4 weeks. Gemcitabine has also been employed in combination with cisplatin in cancer therapy.

[0221] In one exemplary embodiment, the mutant vaccinia virus is administered once or 2-4 times with 0-60 days apart, followed by 1-30 days where no anti-cancer treatment is administered, then gemcitabine is administered 1-7 times with 0-30 days apart, followed by 1-30 days where no anti-cancer treatment is administered. Such treatment scheme can be repeated. In another exemplary embodiment, gemcitabine is administered 1-7 times with 0-30 days apart, followed by 1-10 days where no anti-cancer treatment is administered, then the mutant vaccinia virus is administered once or 2-4 times with 0-60 days apart. This is followed by 5-60 days where no anti-cancer treatment is administered. Such treatment scheme can be repeated. In another exemplary embodiment, gemcitabine is administered 1-7 times with 0-30 days apart, followed by 1-10 days where no anti-cancer treatment is administered, then the mutant vaccinia virus is administered once or 2-4 times with 0-60 days apart. This is followed by 5-60 days where no anti-cancer treatment is administered, then gemcitabine is administered again for 1-7 times with 0-30 days apart. Such treatment scheme can be repeated.

[0222] As will be understood by one of skill in the art, the optimal treatment regimen will vary and it is within the scope of the treatment methods to evaluate the status of the disease under treatment and the general health of the patient prior to, and following one or more cycles of combination therapy in order to determine the optimal therapeutic combination.

[0223] c. Immunotherapies and Biological Therapies

[0224] Therapeutic compounds also include, but are not limited to, compounds that exert an immunotherapeutic effect, stimulate the immune system, carry a therapeutic compound, or a combination thereof. Optionally, the therapeutic agent can exhibit or manifest additional properties, such as, properties that permit its use as an imaging agent, as described elsewhere herein. Such therapeutic compounds include, but are not limited to, anti-cancer antibodies, radiation therapy, siRNA molecules and compounds that suppress the immune system. Immunotherapy includes for example, immune-stimulating molecules (protein-based or non-protein-based), cells and antibodies. Immunotherapy treatments can include stimulating immune cells to act more effectively or to make the tumor cells or tumor associated antigens recognizable to the immune system (i.e., break tolerance).

[0225] Cytokines and growth factors include, but are not limited to, interleukins, such as, for example, interleukin-1, interleukin-2, interleukin-6 and interleukin-12, tumor necrosis factors, such as tumor necrosis factor alpha (TNF-α), interferons such as interferon gamma (IFN-γ), granulocyte macrophage colony stimulating factors (GM-CSF), angiogenins, and tissue factors.

[0226] Anti-cancer antibodies include, but are not limited to, Rituximab, ADEPT, Trastuzumab (Herceptin), Tositumomab (Bexxar), Cetuximab (Erbitux), Ibritumomab (Zevalin), Alemtuzumab (Campath-1H), Epratuzumab (Lymphocide), Gemtuzumab ozogamicin (Mylotarg), Bevacimab (Avastin), Tarceva (Erlotinib), SUTENT (sunitinib malate), Panorex (Edrecolomab), RITUXAN (Rituximab), Zevalin (90Y-ibritumomab tiuexetan), Mylotarg (Gemtuzumab Ozogamicin) and Campath (Alemtuzumab).

[0227] Thus, provided herein are methods of administering to a subject one or more therapeutic compounds that can act in conjunction with the virus to stimulate or enhance the immune system, thereby enhancing the effect of the virus. Such immunotherapy can be either delivered as a separate therapeutic modality or could be encoded (if the immunotherapy is protein-based) by the administered virus.

[0228] Biological therapies are treatments that use natural body substances or drugs made from natural body substances. They can help to treat a cancer and control side effects caused by other cancer treatments such as chemotherapy. Biological therapies are also sometimes called Biological Response Modifiers (BRM's), biologic agents or simply “biologics” because they stimulate the body to respond biologically (or naturally) to cancer. Immunotherapy is treatment using natural substances that the body uses to fight infection and disease. Because it uses natural substances, immunotherapy is also a biological therapy. There are several types of drugs that come under the term biological therapy: these include, for example, monoclonal antibodies (mAbs), cancer vaccines, growth factors for blood cells, cancer growth inhibitors, anti-angiogenic factors, interferon alpha, interleukin-2 (IL-2), gene therapy and BCG vaccine for bladder cancer

[0229] Monoclonal antibodies (mAbs) are of particular interest for treating cancer because of the specificity of binding to a unique antigen and the ability to produce large quantities in the laboratory for mass distribution. Monoclonal antibodies can be engineered to act in the same way as immune system proteins: that is, to seek out and kill foreign matter in your body, such as viruses. Monoclonal antibodies can be designed to recognize epitopes on the surface of cancer cells. The antibodies target specifically bind to the epitopes and either kill the cancer cells or deliver a therapeutic agent to the cancer cell. Methods of conjugating therapeutic agents to antibodies is well-known in the art. Different antibodies have to be made for different types of cancer; for example, Rituximab recognizes CD20 protein on the outside of non Hodgkin's lymphoma cells; ADEPT is a treatment using antibodies that recognize bowel (colon) cancer; and Trastuzumab (Herceptin) recognizes breast cancer cells that produce too much of the protein HER 2 (“HER 2 positive”). Other antibodies include, for example, Tositumomab (Bexxar), Cetuximab (Erbitux), Ibritumomab (Zevalin), Alemtuzumab (Campath-1H), Epratuzumab (Lymphocide), Gemtuzumab ozogamicin (Mylotarg) and Bevacimab (Avastin). Thus, the viruses provided herein can be administered concurrently with, or sequentially to, one or more monoclonal antibodies in the treatment of cancer. In one embodiment, additional therapy is administered in the form of one or more of any of the other treatment modalities provided herein.

[0230] 5. Monitoring

[0231] The methods provided herein can further include one or more steps of monitoring the subject, monitoring the stem-cell implant, stem cell-derived tumor, and/or monitoring the localization of the virus administered to the subject. Any of a variety of monitoring steps can be included in the methods provided herein, including, but not limited to, monitoring tumor size, monitoring anti-(tumor antigen) antibody titer, monitoring the presence and/or size of metastases, monitoring the subject's lymph nodes, monitoring the subject's weight or other health indicators including blood or urine markers, monitoring anti-(viral antigen) antibody titer, monitoring viral expression of a detectable gene product, and directly monitoring viral titer in a tumor, tissue or organ of a subject. In the methods provided herein where the stem cell composition is pretreated with the virus, the progress of the stem cells within the subject also can be monitored by detection of viral expression of a detectable gene product.

[0232] The purpose of the monitoring can be simply for assessing the health state of the subject or the progress of therapeutic treatment of the subject, or can be for determining whether or not further administration of the same or a different virus is warranted, or for determining when or whether or not to administer a compound to the subject where the compound can act to increase the efficacy of the therapeutic method, or the compound can act to decrease the pathogenicity of the virus administered to the subject.

[0233] a. Monitoring Viral Gene Expression

[0234] In some embodiments, the methods provided herein can include monitoring one or more virally expressed genes. Viruses, such as those provided can express one or more detectable gene products, including but not limited to, detectable proteins, such as but not limited to luminescent, fluorescent or proteins that can import detectable molecules into the cell (e.g., transporter proteins). The infected cells in the stem cell composition or stem cell-derived tumor can thus be imaged by one more imaging methods. Measurement of the location of the detectable gene product, for example, by imaging methods including, but not limited to, magnetic resonance, fluorescence, and tomographic methods, can determine the localization of the virus in the subject. Accordingly, the methods provided herein that include monitoring a detectable viral gene product can be used to determine the presence or absence of the virus in one or more organs or tissues of a subject, such as the presence or absence of the virus in a stem cell composition or stem cell-derived tumor or metastases in a subject.

[0235] Further, the methods provided herein that include monitoring a detectable viral gene product can be used to determine the titer of virus present in one or more organs, tissues, tumors or metastases. Methods that include monitoring the localization and/or titer of viruses in a subject can be used for determining the pathogenicity of a virus; since viral infection, and particularly the level of infection, of normal tissues and organs can indicate the pathogenicity of the probe, methods of monitoring the localization and/or amount of viruses in a subject can be used to determine the pathogenicity of a virus. Since methods provided herein can be used to monitor the amount of viruses at any particular location in a subject, the methods that include monitoring the localization and/or titer of viruses in a subject can be performed at multiple time points, and, accordingly can determine the rate of viral replication in a subject, including the rate of viral replication in one or more organs or tissues of a subject; accordingly, the methods of monitoring a viral gene product can be used for determining the replication competence of a virus. The methods provided herein also can be used to quantitate the amount of virus present in a variety of organs or tissues, and tumors or metastases, and can thereby indicate the degree of preferential accumulation of the virus in a subject; accordingly, the viral gene product monitoring methods provided herein can be used in methods of determining the ability of a virus to accumulate in tumor or metastases in preference to normal tissues or organs. Since the viruses used in the methods provided herein can accumulate in an entire tumor or can accumulate at multiple sites in a tumor, and can also accumulate in metastases, the methods provided herein for monitoring a viral gene product can be used to determine the size of a tumor or the number of metastases that are present in a subject. Monitoring such presence of viral gene product in tumor or metastasis over a range of time can be used to assess changes in the tumor or metastasis, including growth or shrinking of a tumor, or development of new metastases or disappearance of metastases, and also can be used to determine the rate of growth or shrinking of a tumor, or development of new metastases or disappearance of metastases, or the change in the rate of growth or shrinking of a tumor, or development of new metastases or disappearance of metastases. Accordingly, the methods of monitoring a viral gene product can be used for monitoring a neoplastic disease in a subject, or for determining the efficacy of treatment of a neoplastic disease, by determining rate of growth or shrinking of a tumor, or development of new metastases or disappearance of metastases, or the change in the rate of growth or shrinking of a tumor, or development of new metastases or disappearance of metastases.

[0236] Any of a variety of detectable proteins can be detected in the monitoring methods provided herein; an exemplary, non-limiting list of such detectable proteins includes any of a variety of fluorescent proteins (e.g., green or red fluorescent proteins), any of a variety of luciferases, transferrin or other iron binding proteins; or receptors, binding proteins, and antibodies, where a compound that specifically binds the receptor, binding protein or antibody can be a detectable agent or can be labeled with a detectable substance (e.g., a radionuclide or imaging agent). Viruses expressing a detectable protein can be detected by a combination of the method provided herein and know in the art. Viruses expressing more than one detectable protein or two or more viruses expressing various detectable protein can be detected and distinguished by dual imaging methods. For example, a virus expressing a fluorescent protein and an iron binding protein can be detected in vitro or in vivo by low light fluorescence imaging and magnetic resonance, respectively. In another example, a virus expressing two or more fluorescent proteins can be detected by fluorescence imaging at different wavelength. In vivo dual imaging can be performed on a subject that has been administered a virus expressing two or more detectable gene products or two or more viruses each expressing one or more detectable gene products.

[0237] b. Monitoring Tumor Size

[0238] Also provided herein are methods of monitoring of the size and location of a stem cell-derived tumor. Tumor and or metastasis size can be monitored by any of a variety of methods known in the art, including external assessment methods or tomographic or magnetic imaging methods. In addition to the methods known in the art, methods provided herein, for example, monitoring viral gene expression, can be used for monitoring tumor and/or metastasis size.

[0239] Monitoring size over several time points can provide information regarding the increase or decrease in size of a tumor or metastasis, and can also provide information regarding the presence of additional tumors and/or metastases in the subject. Monitoring tumor size over several time points can provide information regarding the development of a neoplastic disease in a subject, including the efficacy of treatment of a neoplastic disease in a subject.

[0240] c. Monitoring Antibody Titer

[0241] The methods provided herein also can include monitoring the antibody titer in a subject, including antibodies produced in response to administration of a virus to a subject. The viruses administered in the methods provided herein can elicit an immune response to endogenous viral antigens. The viruses administered in the methods provided herein also can elicit an immune response to exogenous genes expressed by a virus. The viruses administered in the methods provided herein also can elicit an immune response to tumor antigens. Monitoring antibody titer against viral antigens, viral expressed exogenous gene products, or tumor antigens can be used in methods of monitoring the toxicity of a virus, monitoring the efficacy of treatment methods, or monitoring the level of gene product or antibodies for production and/or harvesting.

[0242] In one embodiment, monitoring antibody titer can be used to monitor the toxicity of a virus. Antibody titer against a virus can vary over the time period after administration of the virus to the subject, where at some particular time points, a low anti-(viral antigen) antibody titer can indicate a higher toxicity, while at other time points a high anti-(viral antigen) antibody titer can indicate a higher toxicity. The viruses used in the methods provided herein can be immunogenic, and can, therefore, elicit an immune response soon after administering the virus to the subject. Generally, a virus against which a subject's immune system can quickly mount a strong immune response can be a virus that has low toxicity when the subject's immune system can remove the virus from all normal organs or tissues. Thus, in some embodiments, a high antibody titer against viral antigens soon after administering the virus to a subject can indicate low toxicity of a virus. In contrast, a virus that is not highly immunogenic can infect a host organism without eliciting a strong immune response, which can result in a higher toxicity of the virus to the host. Accordingly, in some embodiments, a high antibody titer against viral antigens soon after administering the virus to a subject can indicate low toxicity of a virus.

[0243] In other embodiments, monitoring antibody titer can be used to monitor the efficacy of treatment methods. In the methods provided herein, antibody titer, such as anti-(tumor antigen) antibody titer, can indicate the efficacy of a therapeutic method such as a therapeutic method to treat neoplastic disease. Therapeutic methods provided herein can include causing or enhancing an immune response against a tumor and/or metastasis. Thus, by monitoring the anti-(tumor antigen) antibody titer, it is possible to monitor the efficacy of a therapeutic method in causing or enhancing an immune response against a tumor and/or metastasis. The therapeutic methods provided herein also can include administering to a subject a virus that can accumulate in a tumor and can cause or enhance an anti-tumor immune response. Accordingly, it is possible to monitor the ability of a host to mount an immune response against viruses accumulated in a tumor or metastasis, which can indicate that a subject has also mounted an anti-tumor immune response, or can indicate that a subject is likely to mount an anti-tumor immune response, or can indicate that a subject is capable of mounting an anti-tumor immune response.

[0244] In other embodiments, monitoring antibody titer can be used for monitoring the level of gene product or antibodies for production and/or harvesting. As provided herein, methods can be used for producing proteins, RNA molecules or other compounds by expressing an exogenous gene in a virus that has accumulated in a tumor. Further provided herein are methods for producing antibodies against a protein, RNA molecule or other compound produced by exogenous gene expression of a virus that has accumulated in a tumor. Monitoring antibody titer against the protein, RNA molecule or other compound can indicate the level of production of the protein, RNA molecule or other compound by the tumor-accumulated virus, and also can directly indicate the level of antibodies specific for such a protein, RNA molecule or other compound.

[0245] d. Monitoring General Health Diagnostics

[0246] The methods provided herein also can include methods of monitoring the health of a subject. Some of the methods provided herein are therapeutic methods, including neoplastic disease therapeutic methods. Monitoring the health of a subject can be used to determine the efficacy of the therapeutic method, as is known in the art. The methods provided herein also can include a step of administering to a subject a virus. Monitoring the health of a subject can be used to determine the pathogenicity of a virus administered to a subject. Any of a variety of health diagnostic methods for monitoring disease such as neoplastic disease, infectious disease, or immune-related disease can be monitored, as is known in the art. For example, the weight, blood pressure, pulse, breathing, color, temperature or other observable state of a subject can indicate the health of a subject. In addition, the presence or absence or level of one or more components in a sample from a subject can indicate the health of a subject. Typical samples can include blood and urine samples, where the presence or absence or level of one or more components can be determined by performing, for example, a blood panel or a urine panel diagnostic test. Exemplary components indicative of a subject's health include, but are not limited to, white blood cell count, hematocrit, or reactive protein concentration.

[0247] e. Monitoring Coordinated with Treatment

[0248] Also provided herein are methods of monitoring a therapy, where therapeutic decisions can be based on the results of the monitoring. Therapeutic methods provided herein can include administering to a subject a virus, where the virus can preferentially accumulate in a tumor and/or metastasis, and where the virus can cause or enhance an anti-tumor immune response. Such therapeutic methods can include a variety of steps including multiple administrations of a particular virus, administration of a second virus, or administration of a therapeutic compound. Determination of the amount, timing or type of virus or compound to administer to the subject can be based on one or more results from monitoring the subject. For example, the antibody titer in a subject can be used to determine whether or not it is desirable to administer a virus or compound, the quantity of virus or compound to administer, and the type of virus or compound to administer, where, for example, a low antibody titer can indicate the desirability of administering additional virus, a different virus, or a therapeutic compound such as a compound that induces viral gene expression. In another example, the overall health state of a subject can be used to determine whether or not it is desirable to administer a virus or compound, the quantity of virus or compound to administer, and the type of virus or compound to administer, where, for example, determining that the subject is healthy can indicate the desirability of administering additional virus, a different virus, or a therapeutic compound such as a compound that induces viral gene expression. In another example, monitoring a detectable virally expressed gene product can be used to determine whether or not it is desirable to administer a virus or compound, the quantity of virus or compound to administer, and the type of virus or compound to administer. Such monitoring methods can be used to determine whether or not the therapeutic method is effective, whether or not the therapeutic method is pathogenic to the subject, whether or not the virus has accumulated in a tumor or metastasis, and whether or not the virus has accumulated in normal tissues or organs. Based on such determinations, the desirability and form of further therapeutic methods can be derived.

[0249] In one embodiment, determination of whether or not a therapeutic method is effective can be used to derive further therapeutic methods. Any of a variety of methods of monitoring can be used to determine whether or not a therapeutic method is effective, as provided herein or otherwise known in the art. If monitoring methods indicate that the therapeutic method is effective, a decision can be made to maintain the current course of therapy, which can include further administrations of a virus or compound, or a decision can be made that no further administrations are required. If monitoring methods indicate that the therapeutic method is ineffective, the monitoring results can indicate whether or not a course of treatment should be discontinued (e.g., when a virus is pathogenic to the subject), or changed (e.g., when a virus accumulates in a tumor without harming the host organism, but without eliciting an anti-tumor immune response), or increased in frequency or amount (e.g., when little or no virus accumulates in tumor).

[0250] In one example, monitoring can indicate that a virus is pathogenic to a subject. In such instances, a decision can be made to terminate administration of the virus to the subject, to administer lower levels of the virus to the subject, to administer a different virus to a subject, or to administer to a subject a compound that reduces the pathogenicity of the virus. In one example, administration of a virus that is determined to be pathogenic can be terminated. In another example, the dosage amount of a virus that is determined to be pathogenic can be decreased for subsequent administration; in one version of such an example, the subject can be pre-treated with another virus that can increase the ability of the pathogenic virus to accumulate in tumor, prior to re-administering the pathogenic virus to the subject. In another example, a subject can have administered thereto a virus that is pathogenic to the subject; administration of such a pathogenic virus can be accompanied by administration of, for example, an antiviral compound (e.g., cidofovir), pathogenicity attenuating compound (e.g., a compound that down-regulates the expression of a lytic or apoptotic gene product), or other compound that can decrease the proliferation, toxicity, or cell killing properties of a virus, as described herein elsewhere. In one variation of such an example, the localization of the virus can be monitored, and, upon determination that the virus is accumulated in tumor and/or metastases but not in normal tissues or organs, administration of the antiviral compound or pathogenicity attenuating compound can be terminated, and the pathogenic activity of the virus can be activated or increased, but limited to the tumor and/or metastasis. In another variation of such an example, after terminating administration of the antiviral compound or pathogenicity attenuating compound, the presence of the virus and/or pathogenicity of the virus can be further monitored, and administration of such a compound can be reinitiated if the virus is determined to pose a threat to the host by, for example, spreading to normal organs or tissues, releasing a toxin into the vasculature, or otherwise having pathogenic effects reaching beyond the tumor or metastasis.

[0251] In another example, monitoring can determine whether or not a virus has accumulated in a tumor or metastasis of a subject. Upon such a determination, a decision can be made to further administer additional virus, a different virus or a compound to the subject. In another example, monitoring the presence of a virus in a tumor can be used in deciding to administer to the subject a compound, where the compound can increase the pathogenicity, proliferation, or immunogenicity of a virus or the compound can otherwise act in conjunction with the virus to increase the proliferation, toxicity, tumor cell killing, or immune response eliciting properties of a virus; in one variation of such an example, the virus can, for example, have little or no lytic or cell killing capability in the absence of such a compound; in a further variation of such an example, monitoring of the presence of the virus in a tumor or metastasis can be coupled with monitoring the absence of the virus in normal tissues or organs, where the compound is administered if the virus is present in tumor or metastasis and not at all present or substantially not present in normal organs or tissues; in a further variation of such an example, the amount of virus in a tumor or metastasis can be monitored, where the compound is administered if the virus is present in tumor or metastasis at sufficient levels.

### E. THERAPEUTIC AND DIAGNOSTIC METHODS FOR THE TREATMENT AND PREVENTION OF TUMORS ASSOCIATED WITH OTHER CELL THERAPIES

[0252] The therapeutic methods provided herein for the treatment and prevention of stem cell-derived tumors can be applied for treating and/or preventing the formation of tumors and metastases resulting from other cellular therapies. A variety of therapies are known in art, which involve the administration of cellular compositions to a subject for the treatment of a disease or disorder. Exemplary of such cell therapies include administration of cellular compositions containing, for example, immune cells, such as, but not limited to T lymphocytes (including Th1 cells, Th2 cells, tumor infusing lymphocytes (TIL) and cytotoxic T cells (CTL)) antigen presenting cells (APC) (including dendritic cells (DC) and macrophages, and natural killer (NK) cells) and non-immune cells including, but not limited to, neuronal, skin, adrenal, keratinocyte, blood, endothelial, kidney, bone, muscle, heart, retinal, pancreas and liver cells. Because these therapies involve administration of live cells, there is a risk of causing tumors in the subject. For example, the cellular compositions may contain neoplastic cells or neoplastic progenitor cells that can potentially form tumors in the subject following administration of the cellular composition.

[0253] Accordingly, provided herein are methods that provide for the safe administration of cell therapies in addition to the stem cell therapies outlined herein. Such methods can be employed to inhibit or treat complications of cell therapy-associated tumor formation that result from administration of cellular compositions to a subject for therapy of a disease or disorder. Exemplary diseases or disorders for which the methods provided herein can be employed include, but are not limited to, cancers, infections and immunodeficiency disorders.

[0254] The therapeutic methods provided herein include, but are not limited to, administering a cellular therapy, such as the administration of a cell composition (e.g., an immune cell composition) to a subject, in combination with an oncolytic virus provided herein to prevent tumor formation or to treat a tumor resulting from or generated by the administered cell composition. In some examples, the virus is administered to a subject having a tumor, where the tumor is caused by the cell therapy (i.e., a cell therapy-associated tumor). In other examples, the virus is administered to a subject who is receiving or has received a cell therapy for the prevention of tumor formation.

[0255] In some examples, the virus is administered concurrently with administration of a cellular composition. In other examples, the virus is administered at a selected time point following administration of a cellular composition. In other examples, the cellular composition is contacted with the virus prior to administration of the cellular composition to the subject in order to eliminate neoplastic cells from the cellular composition. In some examples, the cellular composition is pretreated with the virus prior to administration of the cellular composition to the subject and the same or different oncolytic virus also is administered concurrently with or subsequent to the administration of the pre-treated cellular composition. The viruses can be administered for diagnosis and/or therapy of subjects, such as, but not limited to humans and other mammals, including rodents, dogs, cats, primates, or livestock.

[0256] The viruses for administration can be any of the viruses described and provided herein that are employed in the methods of treatment and prevention of cell therapy-associated tumors. For example, the viruses are typically attentuated viruses that preferentially accumulate in neoplastic cells, including tumors or metastases. Generally, the administered viruses are replication competent viruses and have the ability to preferentially replicate in tumor cells and/or lyse the tumor cells (i.e., oncolytic viruses). In particular examples, the virus is a vaccinia virus, such as, for example, a Lister strain vaccinia virus (e.g., LIVP).

[0257] In some examples, the viruses can express one or more genes whose products are useful for tumor therapy. For example, a virus can express a proteins cause cell death or whose products cause an anti-tumor immune response. Exemplary proteins useful for tumor therapy include, but are not limited to, tumor suppressors, toxins, cytostatic proteins, antiangiogenic proteins, antitumor antibodies, and costimulatory molecules, such as cytokines and chemokines among others provided elsewhere herein and known in the art.

[0258] In some examples, the viruses also can express one or more genes whose products are useful for tumor detection and/or imaging. Exemplary gene products for imaging or detection include detectable proteins or proteins that induce detectable signals, such as, for example luciferases, fluorescent proteins, receptors that can bind imaging agents, or proteins linked to imaging or diagnostic moieties.

[0259] In some exemplary methods, the virus is administered directly to a subject that is administered a cellular composition for the treatment of a disease or disorder. The administered virus accumulates in and infects the administered cellular composition in vivo and can eliminate neoplastic cells or neoplastic progenitor cells of the administered cellular composition in vivo. The oncolytic virus provided herein can be administered concurrently, sequentially, or intermittently with the cellular composition. For example, the virus can be administered to the subject following the administration of the cellular composition, such as, for example, about or 5 minutes, 10 minutes, 15 minutes, 30 minutes, 1 hour, 2 hours, 3 hours, 4 hours, 5 hours, 6 hours, 12 hours, 24 hours, 30 hours, 36 hours, 42 hours, 48 hours, 3 days, 4 days, 5 days, 6 days, 7 days, 8 days, 9 days, 10 days, 11 days, 12 days, 13 days, 14 days, 2 weeks, 3 weeks, 4 weeks, 5 week, 6 weeks or more following the administration of the cellular composition. The cellular composition and/or the virus also can be administered multiple times as described herein, which also are applicable to this method.

[0260] The virus and the cellular composition can be administered in the same composition or in separate compositions. The virus and the cellular composition can be administered via the same route of administration or different routes of administration as provided herein. For example, the cellular composition and the virus can be administered locally or systemically, together in the same composition or in separate compositions, via the same route of administration or different routes of administration.

[0261] Provided are methods of administering a cellular composition that has been pre-treated with an oncolytic virus for the treatment of a disease or disorder in a subject for which cellular therapy is administered. In such methods, the cellular composition to be administered is first contacted with the virus to permit infection of neoplastic cells or neoplastic progenitor cells in the cellular composition. The virus can preferentially infect and replicate in neoplastic cells and neoplastic progenitor cells and eliminate such cells from the cellular composition. At a selected time point following infection, the pre-treated cellular composition is administered to a subject for the treatment of a disease or disorder to be treated by cellular therapy. The infection time selected should be sufficient to permit infection of the cellular composition. In some examples, the cellular composition is contacted with the virus for 1, 2, 3, 4, 5, 6, 7, 8, 9, 10, 11, 12, 18, 24, 30, 36, 42, 48, or 72 hours or more prior to administration of the pretreated cellular composition.

[0262] Provided are methods of administering an oncolytic virus for the treatment of a subject having a tumor resulting from a cellular therapy. In such methods, a subject selected for administration of the virus is one who has been diagnosed as having a tumor following administration of a cellular therapy. In some examples, as described herein, a virus, such as the viruses described herein, can be employed for detection and imaging of the cell therapy-associated tumor in a subject suspected of having a tumor and also can be employed for the treatment of the tumor. In addition, as described herein, such viruses can be employed for the monitoring of treatment of the tumor.

[0263] Any mode of administration of a cellular composition can be employed provided the mode of administration permits the cellular composition to treat the disease or disorder in the subject for which cellular therapy is administered. Modes of administration of cells for cellular therapy are known in the art. One skilled in the art can select any mode of administration compatible with the subject and the disease or disorder to be treated.

[0264] Any mode of administration of an oncolytic virus to a subject can be used, provided the mode of administration permits the virus to infect neoplastic cells of the administered cellular composition or tumor cells of the cell therapy-associated tumor. Modes of administration can include, but are not limited to, systemic, intravenous, intraperitoneal, subcutaneous, intramuscular, transdermal, intradermal, intra-arterial (e.g., hepatic artery infusion), intravesicular perfusion, intrapleural, intraarticular, topical, intratumoral, intralesional, multipuncture (e.g., as used with smallpox vaccines), inhalation, percutaneous, subcutaneous, intranasal, intratracheal, oral, intracavity (e.g., administering to the bladder via a catheter, administering to the gut by suppository or enema), vaginal, rectal, intracranial, intraprostatic, intravitreal, aural, or ocular administration. One skilled in the art can select any mode of administration compatible with the subject and the virus, and that also is likely to result in the virus reaching the cell therapy implant or cell therapy-associated tumor.

### F. PHARMACEUTICAL COMPOSITIONS, COMBINATIONS AND KITS

[0265] Provided herein are pharmaceutical compositions, combinations and kits containing a virus and/or cellular composition provided herein and one or more components. Pharmaceutical compositions can include a virus and/or cellular composition provided herein and a pharmaceutical carrier. Combinations can include two or more viruses, one or more viruses and a cellular composition, a virus and a detectable compound, a virus and a viral expression modulating compound, a virus and a therapeutic compound, or any combination thereof. Kits can include the pharmaceutical compositions and/or combinations provided herein, and one or more components, such as instructions for use, a device for detecting a virus in a subject, a device for administering a compound to a subject, and a device for administering a compound to a subject.

[0266] 1. Pharmaceutical Compositions

[0267] Provided herein are pharmaceutical compositions containing a virus provided herein and a suitable pharmaceutical carrier. Pharmaceutical compositions provided herein can be in various forms, e.g., in solid, liquid, powder, aqueous, or lyophilized form. Examples of suitable pharmaceutical carriers are known in the art and include but are not limited to water, buffers, saline solutions, phosphate buffered saline solutions, various types of wetting agents, sterile solutions, alcohols, gum arabic, vegetable oils, benzyl alcohols, gelatin, glycerin, carbohydrates such as lactose, sucrose, amylose or starch, magnesium stearate, talc, silicic acid, viscous paraffin, perfume oil, fatty acid monoglycerides and diglycerides, pentaerythritol fatty acid esters, hydroxy methylcellulose, powders, among others. Pharmaceutical compositions provided herein can contain other additives including, for example, antioxidants and preservatives, analgesic agents, binders, disintegrants, coloring, diluents, excipients, extenders, glidants, solubilizers, stabilizers, tonicity agents, vehicles, viscosity agents, flavoring agents, emulsions, such as oil/water emulsions, emulsifying and suspending agents, such as acacia, agar, alginic acid, sodium alginate, bentonite, carbomer, carrageenan, carboxymethylcellulose, cellulose, cholesterol, gelatin, hydroxyethyl cellulose, hydroxypropyl cellulose, hydroxypropyl methylcellulose, methylcellulose, octoxynol 9, oleyl alcohol, povidone, propylene glycol monostearate, sodium lauryl sulfate, sorbitan esters, stearyl alcohol, tragacanth, xanthan gum, and derivatives thereof, solvents, and miscellaneous ingredients such as crystalline cellulose, microcrystalline cellulose, citric acid, dextrin, dextrose, liquid glucose, lactic acid, lactose, magnesium chloride, potassium metaphosphate, starch, among others. Such carriers and/or additives can be formulated by conventional methods and can be administered to the subject at a suitable dose. Stabilizing agents such as lipids, nuclease inhibitors, polymers, and chelating agents can preserve the compositions from degradation within the body.

[0268] Colloidal dispersion systems that can be used for delivery of viruses include macromolecule complexes, nanocapsules, microspheres, beads and lipid-based systems including oil-in-water emulsions (mixed), micelles, liposomes and lipoplexes. An exemplary colloidal system is a liposome. Organ-specific or cell-specific liposomes can be used in order to achieve delivery only to the desired tissue. The targeting of liposomes can be carried out by the person skilled in the art by applying commonly known methods. This targeting includes passive targeting (utilizing the natural tendency of the liposomes to distribute to cells of the RES in organs which contain sinusoidal capillaries) or active targeting (for example, by coupling the liposome to a specific ligand, for example, an antibody, a receptor, sugar, glycolipid and protein by methods know to those of skill in the art). In the present methods, monoclonal antibodies can be used to target liposomes to specific tissues, for example, tumor tissue, via specific cell-surface ligands.

[0269] Pharmaceutical compositions provided herein include of cellular compositions for administration. Pharmaceutical compositions for the storage of cells for subsequent administration to a subject are known in the art and can contain suitable carriers and/or buffers appropriate for the preservation of the cells prior to administration.

[0270] 2. Combinations

[0271] Provided are combinations of the viruses provided herein and a second agent, such as a second virus or other therapeutic or diagnostic agent. A combination can include any virus or reagent for effecting attenuation thereof in accord with the methods provided herein. Combinations can include a virus provided herein with one or more additional viruses. Combinations of the viruses provided can also contain pharmaceutical compositions containing the viruses or host cells containing the viruses as described herein.

[0272] In one embodiment, the virus in a combination is an attenuated virus, such as for example, an attenuated vaccinia virus. Exemplary attenuated viruses include vaccinia viruses provided herein, such as, but not limited to, for example, vaccinia viruses described in the Examples: GLV-1h86, GLV-1j87, GLV-1j88, GLV-1j89, GLV-1h90, GLV-1h91, GLV-1h92, GLV-1h96, GLV-1h97, GLV-1h98, GLV-1h104, GLV-1h105, GLV-1h106, GLV-1h107, GLV-1h108 and GLV-1h109.

[0273] Combinations provided herein can contain a virus and a therapeutic compound. Therapeutic compounds for the compositions provided herein can be, for example, an anti-cancer or chemotherapeutic compound. Exemplary therapeutic compounds include, for example, cytokines, growth factors, photosensitizing agents, radionuclides, toxins, siRNA molecules, enzyme/pro-drug pairs, anti-metabolites, signaling modulators, anti-cancer antibiotics, anti-cancer antibodies, angiogenesis inhibitors, chemotherapeutic compounds, or a combination thereof. Viruses provided herein can be combined with an anti-cancer compound, such as a platinum coordination complex. Exemplary platinum coordination complexes include, for example, cisplatin, carboplatin, oxaliplatin, DWA2114R, NK121, IS 3 295, and 254-S. Additional exemplary therapeutic compounds for the use in pharmaceutical composition combinations can be found elsewhere herein (see e.g., Section I. THERAPEUTIC METHODS for exemplary cytokines, growth factors, photosensitizing agents, radionuclides, toxins, siRNA molecules, enzyme/pro-drug pairs, anti-metabolites, signaling modulators, anti-cancer antibiotics, anti-cancer antibodies, angiogenesis inhibitors, and chemotherapeutic compounds). Exemplary chemotherapeutic agents include methotrexate, vincristine, adriamycin, non-sugar containing chloroethylnitrosoureas, 5-fluorouracil, mitomycin C, bleomycin, doxorubicin, dacarbazine, taxol, fragyline, Meglamine GLA, valrubicin, carmustaine and poliferposan, MM1270, BAY 12-9566, RAS farnesyl transferase inhibitor, farnesyl transferase inhibitor, MMP, MTA/LY231514, LY264618/Lometexol, Glamolec, CI-994, TNP-470, Hycamtin/Topotecan, PKC412, Valspodar/PSC833, Novantrone/Mitroxantrone, Metaret/Suramin, Batimastat, E7070, BCH-4556, CS-682, 9-AC, AG3340, AG3433, Incel/VX-710, VX-853, ZD0101, IS1641, ODN 698, TA 2516/Marmistat, BB2516/Marmistat, CDP 845, D2163, PD183805, DX8951f, Lemonal DP 2202, FK 317, Picibanil/OK-432, AD 32/Valrubicin, Metastron/strontium derivative, Temodal/Temozolomide, Evacet/liposomal doxorubicin, Yewtaxan/Placlitaxel, Taxol/Paclitaxel, Xeload/Capecitabine, Furtulon/Doxifluridine, Cyclopax/oral paclitaxel, Oral Taxoid, SPU-077/Cisplatin, HMR 1275/Flavopiridol, CP-358 (774)/EGFR, CP-609 (754)/RAS oncogene inhibitor, BMS-182751/oral platinum, UFT(Tegafur/Uracil), Ergamisol/Levamisole, Eniluracil/776C85/5FU enhancer, Campto/Levamisole, Camptosar/Irinotecan, Tumodex/Ralitrexed, Leustatin/Cladribine, Paxex/Paclitaxel, Doxil/liposomal doxorubicin, Caelyx/liposomal doxorubicin, Fludara/Fludarabine, Pharmarubicin/Epirubicin, DepoCyt, ZD1839, LU 79553/Bis-Naphtalimide, LU 103793/Dolastain, Caetyx/liposomal doxorubicin, Gemzar/Gemcitabine, ZD 0473/Anormed, YM 116, Iodine seeds, CDK4 and CDK2 inhibitors, PARP inhibitors, D4809/Dexifosamide, Ifes/Mesnex/Ifosamide, Vumon/Teniposide, Paraplatin/Carboplatin, Plantinol/cisplatin, Vepeside/Etoposide, ZD 9331, Taxotere/Docetaxel, prodrug of guanine arabinoside, Taxane Analog, nitrosoureas, alkylating agents such as melphelan and cyclophosphamide, Aminoglutethimide, Asparaginase, Busulfan, Carboplatin, Chlorombucil, Cytarabine HCl, Dactinomycin, Daunorubicin HCl, Estramustine phosphate sodium, Etoposide (VP16-213), Floxuridine, Fluorouracil (5-FU), Flutamide, Hydroxyurea (hydroxycarbamide), Ifosfamide, Interferon Alfa-2a, Alfa-2b, Leuprolide acetate (LHRH-releasing factor analogue), Lomustine (CCNU), Mechlorethamine HCl (nitrogen mustard), Mercaptopurine, Mesna, Mitotane (o.p′-DDD), Mitoxantrone HCl, Octreotide, Plicamycin, Procarbazine HCl, Streptozocin, Tamoxifen citrate, Thioguanine, Thiotepa, Vinblastine sulfate, Amsacrine (m-AMSA), Azacitidine, Erythropoietin, Hexamethylmelamine (HMM), Interleukin 2, Mitoguazone (methyl-GAG; methyl glyoxal bis-guanylhydrazone; MGBG), Pentostatin (2′ deoxycoformycin), Semustine (methyl-CCNU), Teniposide (VM-26) and Vindesine sulfate.

[0274] In a further embodiment, the combination can include additional therapeutic compounds such as, for example, compounds that are substrates for enzymes encoded and expressed by the virus, or other therapeutic compounds provided herein or known in the art to act in concert with a virus. For example, the virus can express an enzyme that converts a prodrug into an active chemotherapy drug for killing the cancer cell. Hence, combinations provided herein can contain therapeutic compounds, such as prodrugs. An exemplary virus/therapeutic compound combination can include a virus encoding Herpes simplex virus thymidine kinase with the prodrug gancyclovir. Additional exemplary enzyme/pro-drug pairs, for the use in combinations provided include, but are not limited to, varicella zoster thymidine kinase/gancyclovir, cytosine deaminase/5-fluorouracil, purine nucleoside phosphorylase/6-methylpurine deoxyriboside, beta lactamase/cephalosporin-doxorubicin, carboxypeptidase G2/4-[(2-chloroethyl)(2-mesuloxyethyl)amino]benzoyl-L-glutamic acid, cytochrome P450/acetominophen, horseradish peroxidase/indole-3-acetic acid, nitroreductase/CB 1954, rabbit carboxylesterase/7-ethyl-10-[4-(1-piperidino)-1-piperidino]carbonyloxycampotothecin, mushroom tyrosinase/bis-(2-chloroethyl)amino-4-hydroxyphenylaminomethanone 28, beta galactosidase/1-chloromethyl-5-hydroxy-1,2-dihyro-3H-benz[e]indole, beta glucuronidase/epirubicin-glucoronide, thymidine phosphorylase/5′-deoxy-5-fluorouridine, deoxycytidine kinase/cytosine arabinoside, beta-lactamase and linamerase/linamarin. Additional exemplary prodrugs, for the use in combinations can also be found elsewhere herein (see e.g., Section I. THERAPEUTIC METHODS). Any of a variety of known combinations provided herein or otherwise known in the art can be included in the combinations provided herein.

[0275] In a further embodiment, combinations can include compounds that can kill or inhibit viral growth or toxicity. Combinations provided herein can contain antibiotic, antifungal, anti-parasitic or antiviral compounds for treatment of infections. Exemplary antibiotics which can be included in a combination with a virus provided herein include, but are not limited to, ceftazidime, cefepime, imipenem, aminoglycoside, vancomycin, and antipseudomonal β-lactam. Exemplary antifungal agents which can be included in a combination with a virus provided herein include, but are not limited to, amphotericin B, dapsone, fluconazole, flucytosine, griseofluvin, intraconazole, ketoconazole, miconazole, clotrimazole, nystatin, and combinations thereof. Exemplary antiviral agents can be included in a combination with a virus provided herein include, but are not limited to, cidofovir, alkoxyalkyl esters of cidofovir (CDV), cyclic CDV, and (S)-9-(3-hydroxy-2 phosphonylmethoxypropyl)adenine, 5-(Dimethoxymethyl)-2′-deoxyuridine, isatin-beta-thiosemicarbazone, N-methanocarbathymidine, brivudin, 7-deazaneplanocin A, ST-246, Gleevec, 2′-beta-fluoro-2′,3′-dideoxyadenosine, indinavir, nelfinavir, ritonavir, nevirapine, AZT, ddI, ddC, and combinations thereof. Typically, combinations with an antiviral agent contain an antiviral agent known to be effective against the virus of the combination. For example, combinations can contain a vaccinia virus with an antiviral compound, such as cidofovir, alkoxyalkyl esters of cidofovir, gancyclovir, acyclovir, ST-246, and Gleevec.

[0276] In another embodiment, the combination can further include a detectable compound. A detectable compound can include a ligand or substrate or other compound that can interact with and/or bind specifically to a virally expressed protein or RNA molecule, and can provide a detectable signal, such as a signal detectable by tomographic, spectroscopic, magnetic resonance, or other known techniques. Exemplary detectable compounds can be, or can contain, an imaging agent such as a magnetic resonance, ultrasound or tomographic imaging agent, including a radionuclide. The detectable compound can include any of a variety of compounds as provided elsewhere herein or are otherwise known in the art. Typically, the detectable compound included with a virus in the combinations provided herein will be a compound that is a substrate, a ligand, or can otherwise specifically interact with, a protein or RNA encoded by the virus; in some examples, the protein or RNA is an exogenous protein or RNA. Exemplary viruses/detectable compounds include a virus encoding luciferase/luciferin, β-galactosidase/(4,7,10-tri(acetic acid)-1-(2-β-galactopyranosylethoxy)-1,4,7,10-tetraazacyclododecane) gadolinium (Egad), and other combinations known in the art.

[0277] In another embodiment, the combination can further include a virus gene expression modulating compound. Compounds that modulate gene expression are known in the art, and include, but are not limited to, transcriptional activators, inducers, transcriptional suppressors, RNA polymerase inhibitors, and RNA binding compounds such as siRNA or ribozymes. Any of a variety of gene expression modulating compounds known in the art can be included in the combinations provided herein. Typically, the gene expression modulating compound included with a virus in the combinations provided herein will be a compound that can bind, inhibit, or react with one or more compounds, active in gene expression such as a transcription factor or RNA of the virus of the combination. An exemplary virus/expression modulator can be a virus encoding a chimeric transcription factor complex having a mutant human progesterone receptor fused to a yeast GAL4 DNA-binding domain an activation domain of the herpes simplex virus protein VP16 and also containing a synthetic promoter containing a series of GAL4 recognition sequences upstream of the adenovirus major late E1B TATA box, where the compound can be RU486 (see, e.g., Yu et al., (2002) Mol Genet Genomics 268:169-178). A variety of other virus/expression modulator combinations known in the art also can be included in the combinations provided herein.

[0278] In a further embodiment, combination can further contain nanoparticles. Nanoparticles can be designed such that they carry one or more therapeutic agents provided herein. Additionally, nanoparticles can be designed to carry a molecule that targets the nanoparticle to the tumor cells. In one non-limiting example, nanoparticles can be coated with a radionuclide and, optionally, an antibody immunoreactive with a tumor-associated antigen.

[0279] 3. Kits

[0280] The viruses, cell compositions, pharmaceutical compositions or combinations thereof provided herein can be packaged as kits. Kits can optionally include one or more components such as instructions for use, devices, and additional reagents, and components, such as tubes, containers and syringes for practice of the methods. Exemplary kits can include the viruses provided herein, and can optionally include instructions for use, a device for detecting a virus in a subject, a device for administering the virus to a subject, and a device for administering a compound to a subject.

[0281] In one example, a kit can contain instructions. Instructions typically include a tangible expression describing the virus and/or cellular composition and, optionally, other components included in the kit, and methods for administration, including methods for determining the proper state of the subject, the proper dosage amount, and the proper administration method, for administering the virus and/or cellular composition. Instructions can also include guidance for monitoring the subject over the duration of the treatment time.

[0282] In another example, a kit can contain a device for detecting a virus in a subject. Devices for detecting a virus in a subject can include a low light imaging device for detecting light, for example, emitted from luciferase, or fluoresced from fluorescent protein, such as a green or red fluorescent protein, a magnetic resonance measuring device such as an MRI or NMR device, a tomographic scanner, such as a PET, CT, CAT, SPECT or other related scanner, an ultrasound device, or other device that can be used to detect a protein expressed by the virus within the subject. Typically, the device of the kit will be able to detect one or more proteins expressed by the virus of the kit. Any of a variety of kits containing viruses and detection devices can be included in the kits provided herein, for example, a virus expressing luciferase and a low light imager, or a virus expressing fluorescent protein, such as a green or red fluorescent protein, and a low light imager.

[0283] Kits provided herein also can include a device for administering a virus and/or a cellular composition to a subject. Kits provided herein also can include a device for administering a therapeutic compound to a subject. Any of a variety of devices known in the art for administering medications or vaccines can be included in the kits provided herein. Exemplary devices include, but are not limited to, a hypodermic needle, an intravenous needle, a catheter, a needle-less injection device, an inhaler, and a liquid dispenser, such as an eyedropper. Typically, the device for administering a virus and/or stem cell composition of the kit will be compatible with the virus and/or stem cell composition of the kit; for example, a needle-less injection device such as a high pressure injection device can be included in kits with viruses not damaged by high pressure injection, but is typically not included in kits with viruses damaged by high pressure injection.

### G. EXAMPLES

[0284] The following examples are included for illustrative purposes only and are not intended to limit the scope of the invention.

### Example 1

### Generation of Modified Vaccinia Virus Strains

### A. Construction of Modified Vaccinia Viruses

[0285] 1. Construction of GLV-1h68 and GLV-1h22 Strains

[0286] Exemplary viruses for use in for use in the methods provided were generated by modification of the vaccinia virus strain designated LIVP (a vaccinia virus strain, originally derived by adapting the Lister strain (ATCC Catalog No. VR-1549) to calf skin (Institute for Research on Virus Preparations, Moscow, Russia, Al'tshtein et al. (1983) Dokl. Akad. Nauk USSR 285:696-699). The LIVP strain (whose genome sequence is set forth in SEQ ID NO: 2) from which the viral strains were generated contains a mutation in the coding sequence of the thymidine kinase (TK) gene in which a substitution of a guanine nucleotide with a thymidine nucleotide (nucleotide position 80207 of SEQ ID NO: 2) introduces a premature STOP codon within the coding sequence. The LIVP strain was further modified to generate the GLV-1h68 virus (SEQ ID NO: 1; U.S. Patent Publication No. 2005-0031643 and Japanese Patent No. 3,934,673).

[0287] As described in U.S. Patent Publication No. 2005/0031643 and Japanese Patent No. 3,934,673 (see particularly Example 1 in each application), GLV-1h68 (also named RVGL21, SEQ ID NO: 1) was generated by inserting expression cassettes encoding detectable marker proteins into the F14.5L (also designated in LIVP as F3) gene, thymidine kinase (TK) gene, and hemagglutinin (HA) gene loci of the vaccinia virus LIVP strain. All cloning steps were performed using vaccinia DNA homology-based shuttle plasmids generated for homologous recombination of foreign genes into target loci in the vaccinia virus genome through double reciprocal crossover (see Timiryasova et al. (2001) BioTechniques 31(3) 534-540). As described in U.S. Patent Publication 2005/0031643 and Japanese Patent No. 3,934,673, the GLV-1h68 virus was constructed using plasmids pSC65 (Chakrabarti et al. (1997) Biotechniques 23:1094-1097) and pVY6 (Flexner et al. (1988) Virology 166:339-349) to direct insertions into the TK and HA loci of LIVP genome, respectively. Recombinant viruses were generated by transformation of shuttle plasmid vectors using the FuGENE 6 transfection reagent (Roche Applied Science, Indianapolis, Ind.) into CV-1 cells (ATCC Cat No. CR1-1469), which were pre-infected with the LIVP parental virus, or one of its recombinant derivatives.

[0288] The expression cassettes were inserted in the LIVP genome in three separate rounds of recombinant virus production. In the first round, an expression cassette containing a Ruc-GFP cDNA (a fusion of DNA encoding Renilla luciferase and DNA encoding GFP) under the control of a vaccinia synthetic early/late promoter P_{SEL} was inserted into the Not I site of the F14.5L gene locus. In the second round, the resulting recombinant virus from the first round was further modified by insertion of an expression cassette containing DNA encoding beta-galactosidase (LacZ) under the control of the vaccinia early/late promoter P_{7.5k} (denoted (P_{7.5k})lacZ) and DNA encoding a rat transferrin receptor positioned in the reverse orientation for transcription relative to the vaccinia synthetic early/late promoter P_{SEL} (denoted (P_{SEL})rTrfR) was inserted into the TK gene (the resulting virus does not express transferrin receptor protein since the DNA encoding the protein is positioned in the reverse orientation for transcription relative to the promoter in the cassette). In the third round, the resulting recombinant virus from the second round was then further modified by insertion of an expression cassette containing DNA encoding β-glucuronidase under the control of the vaccinia late promoter P₁₁ₖ (denoted (P₁₁ₖ)gusA) was inserted into the HA gene. The resulting virus containing all three insertions is designated GLV-1h68. The complete sequence of GLV-1h68 is shown in SEQ ID NO: 1.

[0289] Another genetically engineered vaccinia strain, designated GLV-1h22 (SEQ ID NO: 3) was produced that has essentially the same genotype as GLV-1h68, with the exception that, in the expression cassette inserted into the TK gene, the DNA encoding the rat transferrin receptor is in the correct orientation for transcription from the vaccinia synthetic early/late promoter P_{SEL}. GLV-1h22 was constructed using the same method as used to create GLV-1h68, which is described in detail in U.S. Patent Publication No. 2005/0031643, with exception that the expression cassette inserted into the TK locus was generated using the pSC65-TfR transfer vector (also described in U.S. Patent Publication No. 2005/0031643; the parent vector for GLV-1h22 is RVGL19, which is shown in FIG. 1B and described in Example 1 of U.S. Patent Publi

[0290] Insertion of the expression cassettes into the LIVP genome in the generation of strains GLV-1h68 and GLV-1h22 resulted in disruption of the coding sequences for each of the F14.5L, TK and HA genes; accordingly, all three genes in the resulting strains are nonfunctional in that they do not encode the corresponding full-length proteins. As described in U.S. Patent Publication No. 2005/0031643, disruption of these genes not only attenuates the virus but also enhances its tumor-specific accumulation. Previous data have shown that systemic delivery of the GLV-1h68 virus in a mouse model of breast cancer resulted in the complete eradication of large subcutaneous GI-101A human breast carcinoma xenograft tumors in nude mice (see U.S. Patent Publication No. 2005/0031643).cation No. 2005/0031643).

[0291] The expression of the Ruc-GFP fusion protein by the recombinant virus was confirmed by luminescence assay and fluorescence microscopy. Expression of β-galactosidase and β-glucuronidase were confirmed by blue plaque formation upon addition of 5-bromo-4-chloro-3-indolyl-β-D-galactopyranoside (X-gal, Stratagene, La Jolla, Calif.) and 5-bromo-4-chloro-3-indolyl-β-D-glucuronic acid (X-GlcA, Research Product International Corporation, Mt. Prospect, Ill.), respectively. Positive plaques formed by recombinant virus were isolated and purified. The presence of expression cassettes in the F14.5L, TK and HA loci were also confirmed by PCR and DNA sequencing.

[0292] High titer viral preparations were obtained by centrifugation of viral precipitates in sucrose gradients (Joklik W K (1962) Virol. 18:9-18). For testing infection, CV-1 (1×10⁵) and GI-101A (4×10⁵) cells (Dr. A. Aller, Rumbaugh-Goodwin Institute for Cancer Research, Inc., Plantation, Fla.) were seeded onto 24-well plates. After 24 hours in culture, the cells were infected with individual viruses at a multiplicity of infection (MOI) of 0.001. The cells were incubated at 37° C. for 1 hour with brief agitation every 10 minutes to allow infection to occur. The infection medium was removed, and cells were incubated in fresh growth medium until cell harvest at 24, 48, 72, or 96 hours after infection. Viral particles from the infected cells were released by a quick freeze-thaw cycle, and the titers determined as pfu/ml of medium in duplicate by plaque assay in CV-1 cell monolayers. The same procedure was followed using a resting CV-1 cell culture, which was obtained by culturing a confluent monolayer of CV-1 cells for 6 days in DMEM supplemented with 5% FBS, before viral infection.

[0293] 2. Construction of GLV-1h68 and GLV-1h22 Derivative Strains

[0294] Modified vaccinia viruses were generated by replacing nucleic acid or inserting nucleic acid at several loci in the GLV-1h68 vaccinia virus genome as follows: the F14.5L (also referred to as F3; see U.S. Patent Publication No. 2005/0031643), thymidine kinase (TK), hemagglutinin (HA) and A34R gene loci (the A34R gene encodes a C-type lectin-like glycoprotein, gp22-24, that is present in the outer membrane of extracellular enveloped virus (EEV), and that is reported to be required for infectivity of EEV; see, e.g., McIntosh et al. (1996) J. Virol. 70:272081). The heterologous DNA inserted either was (1) a relatively short non-coding DNA fragment, (2) an expression cassette containing protein-encoding DNA operably linked in the correct or reverse orientation to a vaccinia virus promoter, or (3) the coding sequence of the A34R gene (SEQ ID NO: 58) from vaccinia virus strain IHD-J.

[0295] Modified recombinant vaccinia viruses containing heterologous DNA inserted into one or more loci of the vaccinia virus genome were generated via homologous recombination between DNA sequences in the genome and a transfer vector using methods described herein and known to those of skill in the art (see, e.g., Falkner and Moss (1990) J. Virol. 64:3108-2111; Chakrabarti et al. (1985) Mol. Cell Biol. 5:3403-3409; and U.S. Pat. No. 4,722,848). In these methods, the existing target gene in the starting vaccinia virus genome is replaced by an interrupted copy of the gene contained in the transfer vector through two crossover events: a first crossover event of homologous recombination between the vaccinia virus genome and the transfer vector and a second crossover event of homologous recombination between direct repeats within the target locus. The interrupted version of the target gene that is in the transfer vector contains the insertion DNA flanked on each side by DNA corresponding to the left portion of the target gene and right portion of the target gene, respectively. The transfer vector also contains a dominant selection marker, e.g., the E. coli guanine phosphoribosyltransferase (gpt) gene, under the control of a vaccinia virus early promoter (e.g., P_{7.5kE}). Including such a marker in the vector enables a transient dominant selection process to identify recombinant virus grown under selective pressure that has incorporated the transfer vector within its genome. Because the marker gene is not stably integrated into the genome, it is deleted from the genome in a second crossover event that occurs when selection is removed. Thus, the final recombinant virus contains the interrupted version of the target gene as a disruption of the target loci, but does not retain the selectable marker from the transfer vector.

[0296] Homologous recombination between a transfer vector and a starting vaccinia virus genome occurred upon introduction of the transfer vector into cells that have been infected with the starting vaccinia virus. A series of transfer vectors was constructed as described below and the following modified vaccinia strains were constructed: GLV-1i69, GLV-1h70, GLV-1h71, GLV-1h72, GLV-1h73, GLV-1h74, GLV-1h81, GLV-1h82, GLV-1h83, GLV-1h84, GLV-1h85, GLV-1h86, GLV-1j87, GLV-1j88, GLV-1j89, GLV-1h90, GLV-1h91, GLV-1h92, GLV-1h96, GLV-1h97, GLV-1h98, GLV-1h100, GLV-1h101, GLV-1h139, GLV-1h104, GLV-1h105, GLV-1h106, GLV-1h107, GLV-1h108, GLV-1h109, GLV-1h146, GLV-1h150, GLV-1h151, GLV-1h152 and GLV-1h153. The construction of these strains is summarized in the following Table, which lists the modified vaccinia virus strains, including the previously described GLV-1h68, their respective genotypes, and the transfer vectors used to engineer the viruses:

TABLE 2
Generation of engineered vaccinia viruses

| Name of Virus | Parental Virus | VV Transfer Vector | Genotype |
|---|---|---|---|
| GLV-1h68 | — | — | F14.5L: (P_{SEL})Ruc-GFP |
| | | | TK: (P_{SEL})rTrfR-(P_{7.5k})LacZ |
| | | | HA: (P₁₁ₖ)gusA |
| GLV-1i69 | GLV-1h68 | A34R gene from | F14.5L: (P_{SEL})Ruc-GFP |
| | | VV IHD-J | TK: (P_{SEL})rTrfR-(P_{7.5k})LacZ |
| | | | HA: (P₁₁ₖ)gusA |
| | | | A34R: A34R-IHD-J |
| GLV-1h70 | GLV-1h68 | pNCVVhaT | F14.5L: (P_{SEL})Ruc-GFP |
| | | | TK: (P_{SEL})rTrfR-(P_{7.5k})LacZ |
| | | | HA: HindIII-BamHI |
| GLV-1h71 | GLV-1h68 | pNCVVf14.5lT | F14.5L: BamHI-HindIII |
| | | | TK: (P_{SEL})rTrfR-(P_{7.5k})LacZ |
| | | | HA: (P₁₁ₖ)gusA |
| GLV-1h72 | GLV-1h68 | pCR-TKLR-gpt2 | F14.5L: (P_{SEL})Ruc-GFP |
| | | | TK: SacI-BamHI |
| | | | HA: (P₁₁ₖ)gusA |
| GLV-1h73 | GLV-1h70 | pNCVVf14.5lT | F14.5L: BamHI-HindIII |
| | | | TK: (P_{SEL})rTrfR-(P_{7.5k})LacZ |
| | | | HA: HindIII-BamHI |
| GLV-1h74 | GLV-1h73 | pCR-TKLR-gpt2 | F14.5L: BamHI-Hind III |
| | | | TK: SacI-BamHI |
| | | | HA: HindIII-BamHI |
| GLV-1h81 | GLV-1h68 | pNCVVhaT-SEL-hk5 | F14.5L: (P_{SEL})Ruc-GFP |
| | | | TK: (P_{SEL})rTrfR-(P_{7.5k})LacZ |
| | | | HA: (P_{SEL})hk-5 |
| GLV-1h82 | GLV-1h22 | pNCVVhaT-ftn | F14.5L: (P_{SEL})Ruc-GFP |
| | | | TK: (P_{SEL})TrfR-(P_{7.5k})LacZ |
| | | | HA: (P_{SEL})ftn |
| GLV-1h83 | GLV-1h68 | pNCVVhaT-ftn | F14.5L: (P_{SEL})Ruc-GFP |
| | | | TK: (P_{SEL})rTrfR-(P_{7.5k})LacZ |
| | | | HA: (P_{SEL})ftn |
| GLV-1h84 | GLV-1h73 | pCR-TK-SEL-mRFP1 | F14.5L: BamHI-Hind III |
| | | | TK: (P_{SEL})CBG99-mRFP1 |
| | | | HA: Hind III-BamHI |
| GLV-1h85 | GLV-1h72 | pNCVVf14.5lT | F14.5L: BamHI-HindIII |
| | | | TK: Sac I-BamHI |
| | | | HA: (P₁₁ₖ)gusA |
| GLV-1h86 | GLV-1h72 | pNCVVhaT | F14.5L: (P_{SEL})Ruc-GFP |
| | | | TK: Sac I-BamHI |
| | | | HA: Hind III-BamHI |
| GLV-1j87 | GLV-1h68 | pCR-gpt-dA35R6 | F14.5L: (P_{SEL})Ruc-GFP |
| | | | TK: (P_{SEL})rTrfR-(P_{7.5k})LacZ |
| | | | HA: (P₁₁ₖ)gusA |
| | | | A35R: Multiple cloning |
| | | | sites (MCS) |
| GLV-1j88 | GLV-1h73 | pCR-gpt-dA35R6 | F14.5L: BamHI-HindIII |
| | | | TK: (P_{SEL})rTrfR-(P_{7.5k})LacZ |
| | | | HA: HindIII-BamHI |
| | | | A35R: MCS |
| GLV-1j89 | GLV-1h74 | pCR-gpt-dA35R6 | F14.5L: BamHI-HindIII |
| | | | TK: SacI-BamHI |
| | | | HA: HindIII-BamHI |
| | | | A35R: MCS |
| GLV-1h90 | GLV-1h68 | HA-SE-IL-6-1 | F14.5L: (P_{SEL})Ruc-GFP |
| | | | TK: (P_{SEL})rTrfR-(P_{7.5k})LacZ |
| | | | HA: (P_{SE})sIL-6R/IL-6 |
| GLV-1h91 | GLV-1h68 | HA-SEL-IL-6-1 | F14.5L: (P_{SEL})Ruc-GFP |
| | | | TK: (P_{SEL})rTrfR-(P_{7.5k})LacZ |
| | | | HA: (P_{SEL})sIL-6R/IL-6 |
| GLV-1h92 | GLV-1h68 | HA-SL-IL-6-1 | F14.5L: (P_{SEL})Ruc-GFP |
| | | | TK: (P_{SEL})rTrfR-(P_{7.5k})LacZ |
| | | | HA: (P_{SL})sIL-6R/IL-6 |
| GLV-1h96 | GLV-1h68 | FSE-IL-24 | F14.5L: (P_{SE})IL-24 |
| | | | TK: (P_{SEL})rTrfR-(P_{7.5k})LacZ |
| | | | HA: (P₁₁ₖ)gusA |
| GLV-1h97 | GLV-1h68 | FSEL-IL-24 | F14.5L: (P_{SEL})IL-24 |
| | | | TK: (P_{SEL})rTrfR-(P_{7.5k})LacZ |
| | | | HA: (P₁₁ₖ)gusA |
| GLV-1h98 | GLV-1h68 | FSL-IL-24 | F14.5L: (P_{SL})IL-24 |
| | | | TK: (P_{SEL})rTrfR-(P_{7.5k})LacZ |
| | | | HA: (P₁₁ₖ)gusA |
| GLV-1h104 | GLV-1h68 | pCR-TK-SE-tTF-RGD | F14.5L: (P_{SEL})Ruc-GFP |
| | | | TK: (P_{SE})tTF-RGD |
| | | | HA: (P₁₁ₖ)gusA |
| GLV-1h105 | GLV-1h68 | pCR-TK-SEL-tTF-RGD | F14.5L: (P_{SEL})Ruc-GFP |
| | | | TK: (P_{SEL})tTF-RGD |
| | | | HA: (P₁₁ₖ)gusA |
| GLV-1h106 | GLV-1h68 | pCR-TK-SL-tTF-RGD | F14.5L: (P_{SEL})Ruc-GFP |
| | | | TK: (P_{SL})tTF-RGD |
| | | | HA: (P₁₁ₖ)gusA |
| GLV-1h107 | GLV-1h68 | pCR-TK-SE-G6-FLAG | F14.5L: (P_{SEL})Ruc-GFP |
| | | | TK: (P_{SE})G6-FLAG |
| | | | HA: (P₁₁ₖ)gusA |
| GLV-1h108 | GLV-1h68 | pCR-TK-SEL-G6-FLAG | F14.5L: (P_{SEL})Ruc-GFP |
| | | | TK: (P_{SEL})G6-FLAG |
| | | | HA: (P₁₁ₖ)gusA |
| GLV-1h109 | GLV-1h68 | pCR-TK-SL- G6-FLAG | F14.5L: (P_{SEL})Ruc-GFP |
| | | | TK: (P_{SL})G6-FLAG |
| | | | HA:(P₁₁ₖ)gusA |
| GLV-1h99 | GLV-1h68 | FSE-hNET | F14.5L: (PSE)hNET |
| | | | TK: (PSEL)rTrfR-(P7.5k)LacZ |
| | | | HA: (P11k)gusA |
| GLV-1h100 | GLV-1h68 | TK-SE-hNET3 | F14.5L: (PSEL)Ruc-GFP |
| | | | TK: (PSE)hNET |
| | | | HA: (P11k)gusA |
| GLV-1h101 | GLV-1h68 | TK-SL-hNET3 | F14.5L: (PSEL)Ruc-GFP |
| | | | TK: (PSL)hNET |
| | | | HA: (P11k)gusA |
| GLV-1h139 | GLV-1h68 | HA-SE-hNET-1 | F14.5L: (PSEL)Ruc-GFP |
| | | | TK: (PSEL)rTrfR-(P7.5k)LacZ |
| | | | HA: (PSE)hNET |
| GLV-1h146 | GLV-1h100 | HA-SE-IL-24-1 | F14.5L: (PSEL)Ruc-GFP |
| | | | TK: (PSE)hNET |
| | | | HA: (PSE)IL-24 |
| GLV-1h150 | GLV-1h101 | HA-SE-IL-24-1 | F14.5L: (PSEL)Ruc-GFP |
| | | | TK: (PSL)hNET |
| | | | HA: (PSE)IL-24 |
| GLV-1h151 | GLV-1h68 | HA-SE-hNIS-1 | F14.5L: (PSEL)Ruc-GFP |
| | | | TK: (PSEL)rTrfR-(P7.5k)LacZ |
| | | | HA: (PSE)hNIS |
| GLV-1h152 | GLV-1h68 | HA-SEL-hNIS-2 | F14.5L: (PSEL)Ruc-GFP |
| | | | TK: (PSEL)rTrfR-(P7.5k)LacZ |
| | | | HA: (PSEL)hNIS |
| GLV-1h153 | GLV-1h68 | HA-SL-hNIS-1 | F14.5L: (PSEL)Ruc-GFP |
| | | | TK: (PSEL)rTrfR-(P7.5k)LacZ |
| | | | HA: (PSL)hNIS |

Briefly, the strains listed in the table were generated as follows (further details are provided below):

[0297] GLV-1i69 was generated by replacement of the coding sequence of the A34R gene in starting strain GLV-1h68 (nucleotides 153693 to 154199 in SEQ ID NO: 1) with the A34R gene from well-known vaccinia virus IHD-J strain.

[0298] GLV-1h70 was generated by insertion of a short non-coding DNA fragment containing HindIII and BamHI sites into the HA locus of starting strain GLV-1h68 thereby deleting the gusA expression cassette at the HA locus of GLV-1h68. Thus, in strain GLV-1h70, the vaccinia HA gene is interrupted within the coding sequence by a short non-coding DNA fragment.

[0299] GLV-1h71 was generated by insertion of a short non-coding DNA fragment containing BamHI and HindIII sites (SEQ ID NO: 12) into the F14.5L locus of starting strain GLV-1h68 thereby deleting the Ruc-GFP fusion gene expression cassette at the F14.5L locus of GLV-1h68. Thus, in strain GLV-1h71, the vaccinia F14.5L gene is interrupted within the coding sequence by a short non-coding DNA fragment.

[0300] GLV-1h72 was generated by insertion of a short non-coding DNA fragment containing SacI and BamHI sites (SEQ ID NO: 18) into the TK locus of starting strain GLV-1h68 thereby deleting the LacZ/rTFr expression cassette at the TK locus in GLV-1h68. Thus, in strain GLV-1h72, the vaccinia TK gene is interrupted within the coding sequence by a short non-coding DNA fragment.

[0301] GLV-1h73 was generated by insertion of a short non-coding DNA fragment containing BamHI and HindIII sites (SEQ ID NO: 12) into the F14.5L locus of GLV-1h70 thereby deleting the Ruc-GFP fusion gene expression cassette at the F14.5L locus of GLV-1h70. Thus, in strain GLV-1h73, the vaccinia HA and F14.5L genes are interrupted within the coding sequence by a short non-coding DNA fragment.

[0302] GLV-1h74 was generated by insertion of a short non-coding DNA fragment containing Sad and BamHI sites (SEQ ID NO: 18) into the TK locus of strain GLV-1h73 thereby deleting the LacZ/rTFr expression cassette at the TK locus of GLV-1h73. Thus, in strain GLV-1h74, the vaccinia HA, F14.5L and TK genes are interrupted within the coding sequence by a short non-coding DNA fragment.

[0303] GLV-1h81 was generated by insertion of an expression cassette encoding the plasminogen K5 domain under the control of the vaccinia P_{SEL} promoter into the HA locus of starting strain GLV-1h68 thereby deleting the gusA expression cassette at the HA locus of starting GLV-1h68. Thus, in strain GLV-1h81, the vaccinia HA gene is interrupted within the coding sequence by a DNA fragment containing DNA encoding the plasminogen K5 domain operably linked to the vaccinia synthetic early/late promoter.

[0304] GLV-1h82 was generated by insertion of an expression cassette encoding E. coli ferritin under the control of the vaccinia P_{SEL} promoter into the HA locus of strain GLV-1h22 thereby deleting the gusA expression cassette at the HA locus of GLV-1h22. Thus, in strain GLV-1h82, the vaccinia HA gene is interrupted within the coding sequence by a DNA fragment containing DNA encoding E. coli ferritin operably linked to the vaccinia synthetic early/late promoter

[0305] GLV-1h83 was generated by insertion of an expression cassette encoding E. coli ferritin under the control of the vaccinia P_{SEL} promoter into the HA locus of starting strain GLV-1h68 thereby deleting the gusA expression cassette at the HA locus of GLV-1h68. Thus, in strain GLV-1h83, the vaccinia HA gene is interrupted within the coding sequence by a DNA fragment containing DNA encoding E. coli ferritin operably linked to the vaccinia synthetic early/late promoter.

[0306] GLV-1h84 was generated by insertion of an expression cassette containing

[0307] DNA encoding CBG99 and mRFP1 connected through a picornavirus 2A element and under the control of the vaccinia synthetic early/late promoter (P_{SEL}) into the TK locus of strain GLV-1h73 thereby deleting the LacZ/rTFr expression cassette at the TK locus of GLV-1h73. Thus, in strain GLV-1h84, the vaccinia HA and F14.5L genes are interrupted within the coding sequence by a short non-coding DNA fragment, and the vaccinia TK gene is interrupted within the coding sequence by DNA encoding a fusion of CBG99 and mRFP1 proteins. Since DNAs encoding both marker proteins (CBG99 and mRFP1) are under the control of the same promoter, only one transcript is produced. During translation, these two proteins are cleaved into two individual proteins at picornavirus 2A element (Osborn et al., Mol. Ther. 12: 569-74, 2005). CBG99 produces a more stable luminescent signal than does Renilla luciferase with a half-life of greater than 30 minutes, which makes both in vitro and in vivo assays more convenient. mRFP1 provides improvements in in vivo imaging relative to GFP since mRFP1 can penetrate tissue deeper than GFP.

[0308] GLV-1h85 was generated by insertion of a short non-coding DNA fragment containing BamHI and HindIII sites into the F14.5L locus of strain GLV-1h72 thereby deleting the Ruc-GFP fusion gene expression cassette at the F14.5L locus of GLV-1h72. Thus, in strain GLV-1h85, the vaccinia F14.5L and TK genes are interrupted within the coding sequence by a short non-coding DNA fragment.

[0309] GLV-1h86 was generated by insertion of a short non-coding DNA fragment containing HindIII and BamHI sites into the HA locus of strain GLV-1h72 thereby deleting the gusA expression cassette at the HA locus of GLV-1h72. Thus, in strain

[0310] GLV-1h86, the vaccinia TK and HA genes are interrupted within the coding sequence by a short non-coding DNA fragment

[0311] GLV-1j87 was generated by deletion the coding sequence of the A35R gene in starting strain GLV-1h68 (nucleotides 154,243 to 154,773 in SEQ ID NO: 1). Thus, in strain GLV-1j87, the vaccinia A35 gene is replaced by a short non-coding DNA fragment.

[0312] GLV-1j88 was generated by deletion the coding sequence of the A35R gene in starting strain GLV-1h73. Thus, in strain GLV-1j88, the vaccinia A35 gene is replaced by a short non-coding DNA fragment.

[0313] GLV-1j89 was generated by deletion the coding sequence of the A35R gene in starting strain GLV-1h74. Thus, in strain GLV-1j89, the vaccinia A35 gene is replaced by a short non-coding DNA fragment.

[0314] GLV-1h90 was generated by insertion of an expression cassette encoding human IL-6 fused to the 3′ end of the cDNA encoding human soluble IL-6 receptor (sIL-6R, aa 1-323) under the control of the vaccinia P_{SE} promoter into the HA locus of starting strain GLV-1h68, thereby deleting the gusA expression cassette at the HA locus of starting GLV-1h68. Thus, in strain GLV-1h90, the vaccinia HA gene is interrupted within the coding sequence by a DNA fragment containing DNA encoding human IL-6 fused to the 3′ end of the cDNA encoding human soluble IL-6 receptor operably linked to the vaccinia synthetic early promoter.

[0315] GLV-1h91 was generated by insertion of an expression cassette encoding sIL-6R under the control of the vaccinia P_{SEL} promoter into the HA locus of starting strain GLV-1h68, thereby deleting the gusA expression cassette at the HA locus of starting GLV-1h68. Thus, in strain GLV-1h91, the vaccinia HA gene is interrupted within the coding sequence by a DNA fragment containing DNA encoding human IL-6 fused to the 3′ end of the cDNA encoding human soluble IL-6 receptor operably linked to the vaccinia synthetic early/late promoter.

[0316] GLV-1h92 was generated by insertion of an expression cassette encoding sIL-6R under the control of the vaccinia P_{SL} promoter into the HA locus of starting strain GLV-1h68, thereby deleting the gusA expression cassette at the HA locus of starting GLV-1h68. Thus, in strain GLV-1h92, the vaccinia HA gene is interrupted within the coding sequence by a DNA fragment containing DNA encoding human IL-6 fused to the 3′ end of the cDNA encoding human soluble IL-6 receptor operably linked to the vaccinia synthetic late promoter.

[0317] GLV-1h96 was generated by insertion of an expression cassette encoding the IL-24 under the control of the vaccinia P_{SE} promoter into the F14.5L locus of starting strain GLV-1h68, thereby deleting the Ruc-GFP fusion gene expression cassette at the F14.5L locus of GLV-1h68. Thus, in strain GLV-1h96, the vaccinia F14.5L gene is interrupted within the coding sequence by a DNA fragment containing DNA encoding IL-24 operably linked to the vaccinia synthetic early promoter.

[0318] GLV-1h97 was generated by insertion of an expression cassette encoding IL-24 under the control of the vaccinia P_{SEL} promoter into the F14.5L locus of starting strain GLV-1h68, thereby deleting the Ruc-GFP fusion gene expression cassette at the F14.5L locus of GLV-1h68. Thus, in strain GLV-1h97, the vaccinia F14.5L gene is interrupted within the coding sequence by a DNA fragment containing DNA encoding FCU operably linked to the vaccinia synthetic early/late promoter.

[0319] GLV-1h98 was generated by insertion of an expression cassette encoding IL-24 under the control of the vaccinia P_{SL} promoter into the F14.5L locus of starting strain GLV-1h68, thereby deleting the Ruc-GFP fusion gene expression cassette at the F14.5L locus of GLV-1h68. Thus, in strain GLV-1h98, the vaccinia F14.5L gene is interrupted within the coding sequence by a DNA fragment containing DNA encoding IL-24 operably linked to the vaccinia synthetic late promoter.

[0320] GLV-1h104 was generated by insertion of an expression cassette containing DNA encoding truncated human tissue factor fused to the αᵥβ₃-integrin RGD binding motif (tTF-RGD) under the control of the vaccinia synthetic early promoter (P_{SE}) into the TK locus of strain GLV-1h68 thereby deleting the LacZ/rTFr expression cassette at the TK locus of GLV-1h68. Strain GLV-1h104 retains the Ruc-GFP expression cassette at the F14.5L locus and the gusA expression cassette at the HA locus.

[0321] GLV-1h105 was generated by insertion of an expression cassette containing DNA encoding tTF-RGD fusion protein under the control of the vaccinia synthetic early/late promoter (P_{SEL}) into the TK locus of strain GLV-1h68 thereby deleting the LacZ/rTFr expression cassette at the TK locus of GLV-1h68. Strain GLV-1h105 retains the Ruc-GFP expression cassette at the F14.5L locus and the gusA expression cassette at the HA locus.

[0322] GLV-1h106 was generated by insertion of an expression cassette containing DNA encoding tTF-RGD fusion protein under the control of the vaccinia synthetic late promoter (P_{SL}) into the TK locus of strain GLV-1h68 thereby deleting the LacZ/rTFr expression cassette at the TK locus of GLV-1h68. Strain GLV-1h106 retains the Ruc-GFP expression cassette at the F14.5L locus and the gusA expression cassette at the HA locus.

[0323] GLV-1h107 was generated by insertion of an expression cassette containing DNA encoding scFv anti-VEGF-FLAG fusion protein (G6-FLAG) under the control of the vaccinia synthetic early promoter (P_{SE}) into the TK locus of strain GLV-1h68 thereby deleting the LacZ/rTFr expression cassette at the TK locus of GLV-1h68. Strain GLV-1h107 retains the Ruc-GFP expression cassette at the F14.5L locus and the gusA expression cassette at the HA locus.

[0324] GLV-1h108 was generated by insertion of an expression cassette containing DNA encoding G6-FLAG fusion protein under the control of the vaccinia synthetic early/late promoter (P_{SEL}) into the TK locus of strain GLV-1h68 thereby deleting the LacZ/rTFr expression cassette at the TK locus of GLV-1h68. Strain GLV-1h108 retains the Ruc-GFP expression cassette at the F14.5L locus and the gusA expression cassette at the HA locus.

[0325] GLV-1h109 was generated by insertion of an expression cassette containing DNA encoding G6-FLAG fusion protein under the control of the vaccinia synthetic late promoter (P_{SL}) into the TK locus of strain GLV-1h68 thereby deleting the LacZ/rTFr expression cassette at the TK locus of GLV-1h68. Strain GLV-1h109 retains the Ruc-GFP expression cassette at the F14.5L locus and the gusA expression cassette at the HA locus.

[0326] GLV-1h99 was generated by insertion of an expression cassette encoding hNET under the control of the vaccinia P_{SE} promoter into the F14.5L locus of starting strain GLV-1h68, thereby deleting the Ruc-GFP fusion gene expression cassette at the F14.5L locus of starting GLV-1h68. Thus, in strain GLV-1h99, the vaccinia F14.5L gene is interrupted within the coding sequence by a DNA fragment containing DNA encoding hNET operably linked to the vaccinia synthetic early promoter.

[0327] GLV-1h100 was generated by insertion of an expression cassette encoding hNET under the control of the vaccinia P_{SE} promoter into the TK locus of starting strain GLV-1h68 thereby deleting the LacZ/rTFr expression cassette at the TK locus of starting GLV-1h68. Thus, in strain GLV-1h100, the vaccinia TK gene is interrupted within the coding sequence by a DNA fragment containing DNA encoding hNET operably linked to the vaccinia synthetic early promoter.

[0328] GLV-1h101 was generated by insertion of an expression cassette encoding hNET under the control of the vaccinia P_{SL} promoter into the TK locus of starting strain GLV-1h68 thereby deleting the LacZ/rTFr expression cassette at the TK locus of starting GLV-1h68. Thus, in strain GLV-1h101, the vaccinia TK gene is interrupted within the coding sequence by a DNA fragment containing DNA encoding hNET operably linked to the vaccinia synthetic late promoter.

[0329] GLV-1h139 was generated by insertion of an expression cassette encoding hNET under the control of the vaccinia P_{SE} promoter into the HA locus of starting strain GLV-1h68 thereby deleting the gusA expression cassette at the HA locus of starting GLV-1h68. Thus, in strain GLV-1h139, the vaccinia HA gene is interrupted within the coding sequence by a DNA fragment containing DNA encoding hNET operably linked to the vaccinia synthetic early promoter.

[0330] GLV-1h146 was generated by insertion of an expression cassette encoding IL-24 under the control of the vaccinia P_{SE} promoter into the HA locus of starting strain GLV-1h100, thereby deleting the gusA expression cassette at the HA locus of starting GLV-1h100. Thus, in strain GLV-1h146, the vaccinia HA gene is interrupted within the coding sequence by a DNA fragment containing DNA encoding IL-24 operably linked to the vaccinia synthetic early promoter and the vaccinia TK gene is interrupted within the coding sequence by a DNA fragment containing DNA encoding hNET operably linked to the vaccinia synthetic early promoter.

[0331] GLV-1h150 was generated by insertion of an expression cassette encoding IL-24 under the control of the vaccinia P_{SE} promoter into the HA locus of starting strain GLV-1h101, thereby deleting the gusA expression cassette at the HA locus of starting GLV-1h101. Thus, in strain GLV-1h150, the vaccinia HA gene is interrupted within the coding sequence by a DNA fragment containing DNA encoding IL-24 operably linked to the vaccinia synthetic early promoter and the vaccinia TK gene is interrupted within the coding sequence by a DNA fragment containing DNA encoding hNET operably linked to the vaccinia synthetic late promoter.

[0332] GLV-1h151 was generated by insertion of an expression cassette encoding hNIS under the control of the vaccinia P_{SE} promoter into the HA locus of starting strain GLV-1h68 thereby deleting the gusA expression cassette at the HA locus of starting GLV-1h68. Thus, in strain GLV-1h151, the vaccinia HA gene is interrupted within the coding sequence by a DNA fragment containing DNA encoding hNIS operably linked to the vaccinia synthetic early promoter.

[0333] GLV-1h152 was generated by insertion of an expression cassette encoding hNIS under the control of the vaccinia P_{SEL} promoter into the HA locus of starting strain GLV-1h68 thereby deleting the gusA expression cassette at the HA locus of starting GLV-1h68. Thus, in strain GLV-1h152, the vaccinia HA gene is interrupted within the coding sequence by a DNA fragment containing DNA encoding hNIS operably linked to the vaccinia synthetic early/late promoter.

[0334] GLV-1h153 was generated by insertion of an expression cassette encoding hNIS under the control of the vaccinia P_{SL} promoter into the HA locus of starting strain GLV-1h68 thereby deleting the gusA expression cassette at the HA locus of starting GLV-1h68. Thus, in strain GLV-1h153, the vaccinia HA gene is interrupted within the coding sequence by a DNA fragment containing DNA encoding hNIS operably linked to the vaccinia synthetic late promoter.

[0335] 2. VV Transfer Vectors Employed for the Production of Modified Vaccinia Viruses

[0336] The following vectors were constructed and employed as described below to generate the recombinant vaccinia viral strains.

[0337] a. pNCVVhaT: For Insertion of Non-Coding Heterologous DNA into the Vaccinia Virus HA Locus

[0338] The pNCVVhaT vector (SEQ ID NO: 4) was employed to create vaccinia virus strains GLV-1h70 and GLV-1h86 having the following genotypes: F14.5L: (P_{SEL})Ruc-GFP, TK: (P_{SEL})rTrfR-(P_{7.5k})LacZ (strain GLV-1h70), HA: HindIII-BamHI and F14.5L: (P_{SEL})Ruc-GFP, TK: SacI-BamHI, HA: HindIII-BamHI (strain GLV-1h86). Strains GLV-1h70 and GLV-1h86 were generated by inserting a short non-coding DNA fragment containing HindIII and BamHI sites (SEQ ID NO: 5; taagcttcgcaggatccc) into the HA locus of strains GLV-1h68 and GLV-1h72, respectively, thereby deleting the gusA expression cassette at the hemagglutinin (HA) locus of GLV-1h68 and GLV-1h72. Vector pNCVVhaT contains the non-coding DNA fragment flanked by sequences of the HA gene, the E. coli guanine phosphoribosyltransferase (gpt) gene under the control of the vaccinia virus P_{7.5kE} promoter for transient dominant selection of virus that has incorporated the vector, and sequences of the pUC plasmid. The left and right flanking sequences of the VV HA gene (also named A56R, see nucleotides 161420 to 162352 of SEQ ID NO: 2) that were incorporated into the vector correspond to nucleotides 161423 to 161923 and nucleotides 162037 to 162394, respectively of SEQ ID NO: 2. The HA gene flanking DNAs were PCR-amplified from VV LIVP using Platinum PCR SuperMix High Fidelity (Invitrogen, Carlsbad, Calif.) and the following primers containing the non-coding DNA sequence:

Left flank:
(SEQ ID NO: 6)
5′-GCGCATATGACACGATTACCAATACTTTTG-3′
and
(SEQ ID NO: 7)
5′-GTCGGGATCCTGCGAAGCTTAGATTTCGAATACCGACGAGC-3′,
Right Flank:
(SEQ ID NO: 8)
5′-GAAATCTAAGCTTCGCAGGATCCCGACTCCGGAACCAATTACTG-3′
and
(SEQ ID NO: 9)
5′-GCGGAATTCTGATAGATTTTACTATCCCAG-3′.

The two fragments were joined using the method of gene-splicing by overlapping extension (see, e.g., Horton et al., Methods Enzymol., 217:270-279 (1993)). The resulting fragment was digested with NdeI and EcoRI and cloned into the same-cut vector pUCP7.5-gpt-1 (SEQ ID NO: 10) to generate the construct pNCVVhaT. The flanking sequences of HA in the target vector were confirmed by sequencing and were identical to nucleotides 161423 to 161923 of SEQ ID NO: 2 (left flank) and nucleotides 162037 to 162394 of SEQ ID NO: 2 (right flank).

[0339] b. pNCVVf14.51T: for Insertion of Non-Coding Heterologous DNA into the Vaccinia F14.5L Locus

[0340] The pNCVVf14.51T vector (SEQ ID NO: 11) was employed to create vaccinia virus strains GLV-1h71, GLV-1h73 and GLV-1h85 having the following genotypes: F14.5L: BamHI-HindIII, TK: (P_{SEL})rTrfR-(P_{7.5k})LacZ (GLV-1h71), HA: (P₁₁ₖ)_{g}usA; F14.5L: BamHI-HindIII, TK: (P_{SEL})ᵣTrfR-(P_{7.5k})LacZ (GLV-1h73), HA:HindIII-BamHI and F14.5L: BamHI-HindIII, TK:SacI-BamHI (GLV-1h85), HA: (P₁₁ₖ)gusA. Strains GLV-1h71, GLV-1h73 and GLV-1h85 were generated by inserting a short non-coding DNA fragment containing Bam HI and HindIII sites (SEQ ID NO: 12; aggatcctgcgaagct) into the F14.5L locus of strains GLV-1h68, GLV-1h70 and GLV-1h72, respectively, thereby deleting the Ruc-GFP fusion gene expression cassette at the F14.5L locus of these strains. Vector pNCVVf14.51T contains the non-coding DNA fragment flanked by sequences of the F14.5L gene, the E. coli guanine phosphoribosyltransferase (gpt) gene under the control of the vaccinia virus P_{7.5kE} promoter for transient dominant selection of virus that has incorporated the vector, and sequences of the pUC plasmid. The left and right flanking sequences of the VV F14.5L gene (see nucleotides 41476 to 41625 of SEQ ID NO: 2) that were incorporated into the vector correspond to nucleotides 41593 to 42125 and nucleotides 41018 to 41592, respectively of SEQ ID NO: 2. The F14.5L gene flanking DNAs were PCR-amplified from VV LIVP using Platinum PCR SuperMix High Fidelity and the following primers containing the non-coding DNA sequence:

Left Flank:
(SEQ ID NO: 13)
5′-GCGCATATGTAGAAGAATTGATAAATATG-3′
and
(SEQ ID NO: 14)
5′-GCCGCAGGATCCTGCGAAGCTTACAGACACGAATATGACTAAACCGA
TG-3′,
Right Flank:
(SEQ ID NO: 15)
5′-GTCTGTAAGCTTCGCAGGATCCTGCGGCCGCCATCGTCGGTGTGTTG
TC-3′
and
(SEQ ID NO: 16)
5′-GCGGAATTCAGAGGATTACAACAAAAAGATG-3′.

The two fragments were joined together as described above (gene-splicing by overlapping extension). The resulting fragment was digested with NdeI and EcoRI and cloned into the same-cut vector pUCP7.5-gpt-1 (SEQ ID NO: 10) to generate the construct pNCVVf14.51T (SEQ ID NO: 11). The flanking sequences of F14.5L in the target vector were confirmed by sequencing and were identical to nucleotides 41593 to 42125 of SEQ ID NO: 2 (left flank) and nucleotides 41018 to 41592 of SEQ ID NO: 2 (right flank).

[0341] c. pCR-TKLR-gpt2: for Insertion of Non-Coding Heterologous DNA in the Vaccinia TK Locus

[0342] The pCR-TKLR-gpt2 vector (SEQ ID NO: 17) was employed to create vaccinia virus strains GLV-1h72 and GLV-1h74 having the following genotypes: F14.5L: (P_{SEL})Ruc-GFP, TK: SacI-BamHI (GLV-1h72), HA: (P₁₁ₖ)gusA and F14.5L: BamHI-HindIII, TK: SacI-BamHI (GLV-1h74), HA:HindIII-BamHI. Strain GLV-1h72 was generated by inserting a short non-coding DNA fragment containing SacI and BamHI sites (SEQ ID NO: 18; ggtaccgagctcggatcc) into the TK locus of starting strain GLV-1h68 thereby deleting the LacZ/rTFr expression cassette at the TK locus of GLV-1h68. Strain GLV-1h74 was generated by inserting the short non-coding DNA fragment containing SacI and Bam HI sites into the TK locus of strain GLV-1h73 thereby deleting the LacZ/rTFr expression cassette at the TK locus of GLV-1 h73.

[0343] Vector pCR-TKLR-gpt2 was generated from vector pCR2.1 (Invitrogen, Carlsbad, Calif., SEQ ID NO: 21) and contains the non-coding DNA fragment flanked by sequences of the TK gene and the E. coli guanine phosphoribosyltransferase (gpt) gene under the control of the vaccinia virus P_{7.5kE} promoter for transient dominant selection of virus that has incorporated the vector. The left flank (TK_{L}) of the TK locus in the LIVP genome that was incorporated into the vector corresponds to nucleotides 79726 to 80231 of SEQ ID NO: 2 (TK locus in the LIVP genome is located at nucleotides 78142 to 80961 of SEQ ID NO: 2). The left flank DNA was PCR amplified with the primers TK_{L}-5 (5′-ATAAGCTTTGTTACAGATGGAAGGGTCAAA-3′, SEQ ID NO: 19) and TK_{L}-3 (5′-AGGTACCGTTTGCCATACGCTCACAGA-3′, SEQ ID NO: 20) using Invitrogen High Fidelity PCR mix. The PCR product was digested with HindIII and KpnI, and inserted into the corresponding sites in vector pCR2.1 (Invitrogen, Carlsbad, Calif., SEQ ID NO: 21), resulting in pCP-TKL1 (SEQ ID NO: 22). The right flanking region (TK_{R}) of the TK locus in the LIVP genome that was incorporated into the vector corresponds to nucleotides 80211 to 80730 of SEQ ID NO: 2. The right flank DNA was PCR amplified with the primers: TK_{R}-5 (5′-TGAGCTCGGATCCTTCTGTGAGCGTATGGCAAA-3′, SEQ ID NO: 23) and TK_{R}-3 (5′-TTACTAGTACACTACGGTGGCACCATCT-3′, SEQ ID NO: 24). The PCR product was digested with BamHI and SpeI and cloned into the corresponding sites in vector pCR2.1 to yield pCR-TKR4 (SEQ ID NO: 25). The pCR-TKL1 and pCR-TKR4 contained the correct sequences of TK_{L} and TK_{R}, respectively, as confirmed by sequencing and were identical to nucleotides 79726 to 80231 of SEQ ID NO: 2 (left flank) and nucleotides 80211 to 80730 of SEQ ID NO: 2 (right flank). The insert TK_{L} was then excised from pCR-TKL1 by restriction digestion with HindIII and BamHI and inserted into the same-cut vector pCR-TKR4 to yield pCR-TKLR1 (SEQ ID NO: 26) thereby joining the left and right flanking sequences with the non-coding DNA between them in a single fragment.

[0344] In order to add DNA encoding Escherichia coli guanine phosphoribosyltransferase (gpt) linked to the vaccinia virus promoter p7.5 k to pCR-TKLR1 for use in transient dominant selection, a DNA fragment containing these elements was amplified with the primers gpt5 (5′-TCCCAGTCACGACGTTGTAA-3′, SEQ ID NO: 27) and gpt3 (5′-TGATTACGCCAAGCTGATCC-3′, SEQ ID NO: 28) from pUCP7.5-gpt-1 and cloned into vector pCR2.1. The sequence of the insert p7.5 k-gpt was confirmed and released with EcoRI and cloned into the same-cut vector pCR-TKLR1 to generate the final transfer vector pCR-TKLR-gpt2 (SEQ ID NO: 17).

[0345] d. pNCVVhaT-SEL-hk5: for Insertion of an Expression Cassette Encoding Plasminogen Kringle 5 Domain Under the Control of the Vaccinia P_{SEL} Promoter into the Vaccinia HA Locus

[0346] Vector pNCVVhaT-SEL-hk5 (SEQ ID NO: 41) was employed to develop strain GLV-1h81 having the following genotype: F14.5L: (P_{SEL})Ruc-GFP, TK: (P_{SEL})rTrfT-(P_{7.5k})LacZ, HA: (P_{SEL})hk-5. Strain GLV-1h81 was generated by inserting DNA encoding the human plasminogen kringle 5 domain (SEQ ID NO: 42) operably linked to the vaccinia virus synthetic early/late promoter (P_{SEL}) (SEQ ID NO: 29) into the HA locus of starting strain GLV-1h68 thereby deleting the gusA expression cassette at the HA locus of GLV-1h68. Vector pNCVVhaT-SEL-hk5 contains a DNA fragment encoding the human plasminogen kringle 5 domain operably linked to the vaccinia synthetic early/late promoter (P_{SEL}), sequences of the HA gene flanking the (PsEL)hk-5 DNA fragment, the E. coli guanine phosphoribosyltransferase (gpt) gene under the control of the vaccinia virus P_{7.5kE} promoter for transient dominant selection of virus that has incorporated the vector, and sequences of the pUC plasmid.

[0347] To generate vector pNCVVhaT-SEL-hk5, DNA encoding human plasminogen kringle 5 was PCR-amplified from the plasmid pBLAST-hKringle5 (Invivogen, San Diego, Calif.; SEQ ID NO: 43) using AccuPrime Pfx SuperMix (Invitrogen, Carlsbad, Calif.) and primers: 5′-GCGAAGCTTACCATGTACAGGATGCAACTCCTGTCTTG-3′ (SEQ ID NO: 44) and 5′-GCGGGATCCAGAAAAACTAATCAAATGAAGGGGCCGCACACTG-3′ (SEQ ID NO: 45). The PCR product was digested with HindIII and BamHI and cloned into the same-cut vector pNCVVhaT-SEL-ADP-V5 (SEQ ID NO: 46); similar to pNCVVhaT, but contains ADP-V5 under the control of the synthetic early/late promoter in between the flanking sequences of HA to replace adenovirus death protein (ADP) gene tagged with V5 at 3′ end. The sequence of the human plasminogen kringle 5 domain was confirmed by sequencing.

[0348] e. pNCVVhaT-ftn: for Insertion of an Expression Cassette Encoding E. coli Ferritin Under the Control of the Vaccinia P_{SEL} Promoter into the Vaccinia HA Locus

[0349] Vector pNCVVhaT-ftn (SEQ ID NO: 47) was employed to develop strains GLV-1h82 and GLV-1h83 having the following genotypes:, F14.5L: (P_{SEL})Ruc-GFP, TK: (P_{SEL})TrfR-(P_{7.5k})LacZ (strain GLV-1h82), HA: (P_{SEL})ftn, and F14.5L: (P_{SEL})Ruc-GFP, TK: (P_{SEL})rTrfR-(P_{7.5k})LacZ (strain GLV-1h83), HA: (P_{SEL})ftn. Strains GLV-1h82 and GLV-1h83 were generated by inserting DNA encoding E. coli ferritin (ftn) (SEQ ID NO: 48) operably linked to the vaccinia virus synthetic early/late promoter (P_{SEL}) (SEQ ID NO: 29) into the HA locus of starting strains GLV-1h22 and GLV-1h68, respectively, thereby deleting the gusA expression cassette at the HA locus of these starting strains. Vector pNCVVhaT-ftn contains a DNA fragment encoding E. coli ferritin operably linked to the vaccinia synthetic early/late promoter(P_{SEL}), sequences of the HA gene flanking the (P_{SEL})ftn DNA fragment, the E. coli guanine phosphoribosyltransferase (gpt) gene under the control of the vaccinia virus P_{7.5kE} promoter for transient dominant selection of virus that has incorporated the vector, and sequences of the pUC plasmid.

[0350] To generate vector pNCVVhaT-ftn, DNA encoding E. coli ferritin (ftn) was amplified from genomic DNA of E. coli Top10 (Invitrogen, Carlsbad, Calif.) using the following primers:

5′SSEL-ftn-VV3
(SEQ ID NO: 49)
(5′-AAAGATAAGCTTAAAAATTGAAATTTTATTTTTTTTTTTTGGAATA
TAAATACCATGCTGAAACCAGAAATGATTGAA-3′)
and
(SEQ ID NO: 50)
3′ ftn-VV2
(5′-ATAATAGGATCCTTAGTTTTGTGTGTCGAGGGT-3′).

[0351] Primer 5′SSEL-ftn-VV3 introduces a HindIII site, the P_{SEL} promoter sequence for vaccinia virus synthetic strong early/late expression, and a Kozak sequence (ACC) in front of the start codon of ftn. 3′ ftn-VV2 introduces a BamHI restriction site. The PCR product as well as the plasmid pNCVVhaT (SEQ ID NO: 4) were digested with BamHI and HindIII, ligated, and transformed into E. coli Top10 to yield pNCVVhaT-ftn ID NO: 47). This final cloning step places the (P_{SEL})ftn expression cassette between the left and right HA gene flanking sequences in pNCVVhaT and eliminates the non-coding DNA that is located between these flanking sequences in pNCVVhaT.

[0352] f. pCR-TK-SEL-mRFP1: for Insertion of an Expression Cassette Encoding a Fusion Protein of CBG99 and mRFP1 Under the Control of the Vaccinia P_{SEL} Promoter into the Vaccinia TK Locus

[0353] Vector pCR-TK-SEL-mRFP1 (SEQ ID NO: 51) was employed to develop strain GLV-1h84 having the following genotype: F14.5L: BamHI-HindIII, TK: (P_{SEL})CBG99-mRFP1, HA: HindIII-BamHI. Strain GLV-1h84 was generated by inserting DNA encoding a fusion protein of CBG99 (green-emitting click beetle luciferase) and mRFP1 (red fluorescent protein) linked through a picornavirus 2A element (SEQ ID NO: 52) operably linked to the vaccinia virus synthetic early/late promoter (P_{SEL}) (SEQ ID NO: 29) into the TK locus of strain GLV-1h73 thereby deleting the rTrfR-LacZ expression cassette at the TK locus of strain GLV-1h73. Vector pCR-TK-SEL-mRFP1 contains a DNA fragment encoding a CBG99-mRFP1 fusion protein operably linked to the vaccinia synthetic early/late promoter (P_{SEL}), sequences of the TK gene flanking the (P_{SEL})-fusion protein-encoding DNA fragment, the E. coli guanine phosphoribosyltransferase (gpt) gene under the control of the vaccinia virus P7.5k early and late promoter for transient dominant selection of virus that has incorporated the vector, and sequences of the pUC plasmid.

[0354] To generate vector pCR-TK-SEL-mRFP1, cDNA encoding the fusion protein CBG99 (green-emitting click beetle luciferase) and mRFP1 (red fluorescent protein) linked through the picornavirus 2A element was PCR amplified from CBG99-2A-mRFP1 (SEQ ID NO: 53) with the primers:

(SEQ ID NO: 54)
mRFP5 (5′-GTCGACGCCACCATGGTGAAGCGTGAG-3′)
and
(SEQ ID NO: 55)
mRFP3 (5′-TCATTAGGCGCCGGTGGAGT-3′).

[0355] The PCR product was cloned into vector pCR-Blunt II-TOPO (Invitrogen; SEQ ID NO: 40) to yield pCRII-mRFP (SEQ ID NO: 56). After confirming the sequence, the CBG99-mRFP1 fusion cDNA molecule (SEQ ID NO: 52) was released by SalI and EcoRV restriction enzyme digest and inserted into pCR-SEL4 (SEQ ID NO: 33), precut with SalI and SmaI to generate plasmid pCR-SEL-mRFP1 (SEQ ID NO: 57). (pCR-SEL4 was constructed as follows: The cDNA spanning the synthetic early/late promoter P_{SEL} (SEQ ID NO: 29) for vaccinia virus and the multiple cloning site (MCS) region in pSC65 (SEQ ID NO: 30) was PCR amplified with the primers SEL5 (5′-TAGAGCTCGGTTTGGAATTAGTGAAAGC-3′) (SEQ ID NO: 31) and SEL3 (5′-TAGAGCTCTCCAGACATTGTTGAATTAG-3′) (SEQ ID NO: 32), and cloned into the TA cloning site of vector pCR2.1 to yield pCR-SEL4 (SEQ ID NO: 33)). This intermediate cloning step placed the fusion cDNA molecule under the control of vaccinia virus synthetic early/late promoter (P_{SEL}). The SEL-CBG99-mRFP1 expression cassette was then released by Sad digestion and cloned into the same-cut vaccinia virus TK locus transfer vector pCR-TKLR-gpt2 (SEQ ID NO: 17) to give the final construct pCR-TK-SEL-mRFP1 (SEQ ID NO: 51). This final cloning step placed the (P_{SEL})CBG99-mRFP1 expression cassette between the left and right TK gene flanking sequences in pCR-TKLR-gpt2 and eliminated the non-coding DNA that is located between these flanking sequences in pCR-TKLR-gpt2.

[0356] g. pCR-gpt-dA35R6: for Deletion of the A35R Locus and Insertion of a Non-Coding Heterologous DNA with Multiple Cloning Sites

[0357] Vector pCR-gpt-dA35R-6 (SEQ ID NO: 89) was employed to create vaccinia strains GLV-1j87, GLV-1j88 and GLV-1j89, having the following genotypes: F14.5L: (P_{SEL})Ruc-GFP, TK: (P_{SEL})rTrfR-(P_{7.5k})LacZ, HA: (P₁₁ₖ)gusA, A35R: deleted, multiple cloning sites (MCS) (strain GLV-1j87); F14.5L: BamHI-HindIII, TK: (P_{SEL})rTrfR-(P_{7.5k})LacZ, HA: HindIII-BamHI, A35R: deleted, MCS (strain GLV-1j88); and F14.5L: BamHI-HindIII, TK: SacI-BamHI, HA: HindIII-BamHI, A35R: deleted, MCS (strain GLV-1j89). Strains GLV-1j87, GLV-1j88 and GLV-1j89, were generated by inserting a short DNA fragment with multiple cloning sites (HindIII, Sad and BamHI) into the A35R locus of strains GLV-1h68, GLV-1h73 and GLV-1h74, respectively, thereby creating a fusion of the flanking A34R and A36R regions and deleting the A35R gene. Vector pCR-gpt-dA35R-6 contains a non-coding DNA fragment with multiple cloning sites flanked by sequences that flank the A35R gene (a fusion of A34R and A36R regions) and the E. coli guanine phosphoribosyltransferase (gpt) gene under the control of the vaccinia virus P_{7.5kE} promoter for transient dominant selection of virus that has incorporated the vector.

[0358] The left and right flanking sequences of A35R, the A34R and A36R regions, were PCR amplified. The A34R gene region was PCR amplified with primers

[0359] A34R-L: 5′-ATCTCGAGTGAGGATACATGGGGATCTGATG-3′ (SEQ ID NO: 66) and

[0360] A34R-R: 5′-ATGAGCTCCCGGGAAGCTTGGCGGCGTACGTTAACGAC-3′ (SEQ ID NO: 67), using LIVP genomic DNA (SEQ ID NO: 2) as the template.

[0361] The A36R gene region was PCR amplified with primers

[0362] A36R-L: 5′-ATGAGCTCGGATCCTGCATATCAGACGGCAATGG-3′ (SEQ ID NO: 68) and

[0363] A36R-R: 5′-ATGGGCCCATCGCTATGTGCTCGTCTA-3′ (SEQ ID NO: 69), using LIVP genomic DNA (SEQ ID NO: 2) as the template.

[0364] The A34R and A36R PCR products were digested with Sad, and the restricted products were then purified and ligated together. The A34R and A36R ligation product was used as the template for PCR amplification of the A34R and A36R fusion cDNA, with primers A34R-L and A36R-R. The amplified fusion cDNA was cloned into pCR-Blunt II-TOPO vector (Invitrogen; SEQ ID NO: 40) to generate vector pCRII-dA35R-1 (SEQ ID NO: 87). The resulting vector was confirmed by sequencing.

[0365] A p7.5-gpt expression vector with the HindIII, SacI and BamHI sites removed was then generated. The TK region in the TK locus transfer vector pCR-TKLR-gpt2 (SEQ ID NO: 17) was removed with HindIII and SpeI digestion. The vector fragment was blunt ended with Klenow treatment, and then ligated to generate construct pCR-dTK-gpt1 (SEQ ID NO: 88). The restriction sites HindIII, SacI and BamHI are removed in the resulting pCR-dTK-gpt1 vector (SEQ ID NO: 88).

[0366] To generate pCR-gpt-dA35R-6, the A34R and A36R fusion cDNA was released from pCRII-dA35R-1 (SEQ ID NO: 87) by XhoI and ApaI digestion, and inserted into vector pCR-dTK-gpt1 (SEQ ID NO: 88), precut with XhoI and ApaI. The resulting construct pCR-gpt-dA35R-6 (SEQ ID NO: 89) was confirmed by sequencing.

[0367] h. HA-SE-IL-6-1: for Insertion of an Expression Cassette Encoding sIL-6R/IL-6 Under the Control of the Vaccinia P_{SE} Promoter into the Vaccinia HA Locus.

[0368] Vector HA-SE-IL-6-1 (SEQ ID NO: 77) was employed to develop strain GLV-1h90 having the following genotype: F14.5L: (P_{SEL})Ruc-GFP, TK: (P_{SEL})rTrfR-(P_{7.5k})LacZ, HA: (P_{SE})sIL-6R/IL-6. Strain GLV-1h90 was generated by inserting DNA encoding a fusion protein of human IL-6 (encoding amino acids 29˜212) fused to the human soluble IL-6 receptor (sIL-6R) (amino acids 1˜323) by a linker sequence (encoding RGGGGSGGGGSVE (SEQ ID NO: 90); complete sequence of sIL-6R/IL insert (SEQ ID NO: 106)) operably linked to the vaccinia virus synthetic early promoter (P_{SE}) (SEQ ID NO: 35) into the HA locus of strain GLV-1h68, thereby deleting the gusA expression cassette at the HA locus of starting GLV-1h68. Vector HA-SE-IL-6-1 contains a DNA fragment encoding the sIL-6R/IL-6 fusion protein operably linked to the vaccinia synthetic early promoter (P_{SE}) and sequences of the HA gene flanking the (P_{SE})-fusion protein-encoding DNA fragment.

[0369] Plasmid pCR-SE1 (SEQ ID NO: 36), containing the vaccinia synthetic early promoter, i.e., P_{SE}, was used as the source of the vaccinia synthetic early promoter in generating vector HA-SE-IL-6-1. pCR-SE1 was constructed as follows. The multiple cloning site (MCS) region in pSC65 (Moss and Earl, Current Protocols in Molecular Biology, 16.17.4, 1998; SEQ ID NO: 30) was PCR amplified with the primers:

[0370] SE5:

[0371] 5′-TAGAGCTCAAAAATTGAAAAACTAGCGTCTTTTTTTGCTCGAAGTCGAC AGATCTAGGCCTG-3′ (SEQ ID NO: 34), containing the sequence for synthetic early promoter P_{SE} (SEQ ID NO: 35), and

[0372] SEL3:

[0373] 5′-TAGAGCTCTCCAGACATTGTTGAATTAG-3′(SEQ ID NO: 32).

The resulting PCR product was inserted into the TA cloning site of vector pCR2.1 to obtain pCR-SE1 (SEQ ID NO: 36).

[0374] To generate vector HA-SE-IL-6-1, cDNA encoding the fusion protein sIL-6R/IL-6 was PCR amplified from pCDM8-H-IL-6 (U.S. Pat. No. 7,112,436) with the primers:

(SEQ ID NO: 62)
5′-GTCGACCCACCATGCTGGCCGTCGGCTGCGC-3′
and
(SEQ ID NO: 63)
5′-GGTACCCTAGAGTCGCGGCCGCGACC-3′.

[0375] The PCR product was cloned into vector pCR-Blunt II-TOPO (Invitrogen; SEQ ID NO: 40) to yield pCRII-IL6-3 (SEQ ID NO: 73). After confirming the sequence, the sIL-6R/IL-6 fusion cDNA molecule (SEQ ID NO: 106) was released by KpnI (blunt ended) and SalI restriction enzyme digest and inserted into vector pCR-SE1 (SEQ ID NO: 36), precut with SalI and SmaI to generate plasmid pCR-SE-IL6-7 (SEQ ID NO: 74), thus placing the IL-6 fusion cDNA under the control of vaccinia virus synthetic early (SE) promoter.

[0376] The cDNA of SE-IL6 was released from pCR-SE-IL6-7 (SEQ ID NO: 74) by HindIII and BamHI restriction enzyme digest and inserted into the HA transfer vector, pNCVVhaT (SEQ ID NO: 4), precut with HindIII and BamHI to generate plasmid HA-SE-IL6-1 (SEQ ID NO: 77). The SL-sIL-6R/IL-6 fusion expression was confirmed by sequencing.

[0377] i. HA-SEL-IL-6-1: for Insertion of an Expression Cassette Encoding sIL-6R/IL-6 Under the Control of the Vaccinia P_{SEL} Promoter into the Vaccinia HA Locus.

[0378] Vector HA-SEL-IL-6-1 (SEQ ID NO: 79) was employed to develop strain GLV-1h91 having the following genotype: F14.5L: (P_{SEL})Ruc-GFP, TK: (P_{SEL})rTrfR-(P_{7.5k})LacZ, HA: (P_{SEL})sIL-6R/IL-6. Strain GLV-1h91 was generated by inserting DNA encoding the sIL-6R/IL-6 fusion protein operably linked to the vaccinia virus synthetic early/late promoter (P_{SEL}) (SEQ ID NO: 29) into the HA locus of starting strain GLV-1h68, thereby deleting the gusA expression cassette at the HA locus of starting GLV-1h68. Vector HA-SL-IL-6-1 contains a DNA fragment encoding the sIL-6R/IL-6 fusion protein operably linked to the vaccinia synthetic early promoter (P_{SEL}) and sequences of the HA gene flanking the (P_{SEL})-fusion protein-encoding DNA fragment.

[0379] Plasmid pCR-SEL4 (SEQ ID NO: 33; see (f) above for construction of pCR-SEL4), containing the vaccinia synthetic early/late promoter, i.e., P_{SEL}, was used as the source of the vaccinia synthetic early/late in generating vector HA-SEL-IL-6-1.

[0380] To generate vector HA-SL-IL-6-1, the sIL-6R/IL-6 fusion cDNA molecule (SEQ ID NO: 106) was released from vector pCRII-IL6-3 (see (h) above; SEQ ID NO: 73) by KpnI and SalI restriction enzyme digest and inserted into vector pCR-SEL4 (SEQ ID NO: 33), precut with SalI and SmaI to generate plasmid pCR-SEL-IL6-2 (SEQ ID NO: 76), thus placing the IL-6 fusion cDNA under the control of vaccinia virus synthetic early/late (SEL) promoter.

[0381] The cDNA of SEL-IL6 was released from pCR-SEL-IL6-2 (SEQ ID NO: 76) by HindIII restriction enzyme digest and inserted into the HA transfer vector, pNCVVhaT (SEQ ID NO: 4), precut with HindIII to generate plasmid HA-SEL-IL6-1 (SEQ ID NO: 79). The SEL-sIL-6R/IL-6 fusion expression cassette was confirmed by sequencing.

[0382] j. HA-SL-IL-6-1: for Insertion of an Expression Cassette Encoding sIL-6R/IL-6 Under the Control of the Vaccinia P_{SL} Promoter into the Vaccinia HA Locus.

[0383] Vector HA-SL-IL-6-1 (SEQ ID NO: 78) was employed to develop strain GLV-1h92 having the following genotype: F14.5L: (P_{SEL})Ruc-GFP, TK: (P_{SEL})rTrfR-(P_{7.5k})LacZ, HA: (P_{SL})sIL-6R/IL-6. Strain GLV-1h92 was generated by inserting DNA encoding the sIL-6R/IL-6 fusion protein (SEQ ID NO: 106) operably linked to the vaccinia virus synthetic late promoter (P_{SL}) (SEQ ID NO: 38) into the HA locus of starting strain GLV-1h68, thereby deleting the gusA expression cassette at the HA locus of starting GLV-1h68. Vector HA-SL-IL-6-1 contains a DNA fragment encoding the sIL-6R/IL-6 fusion protein operably linked to the vaccinia synthetic late promoter (P_{SL}) and sequences of the HA gene flanking the (P_{SL})-fusion protein-encoding DNA fragment.

[0384] Plasmid pCR-SL3 (SEQ ID NO: 39), containing the vaccinia synthetic late promoter, i.e., P_{SL}, was used as the source of the vaccinia synthetic late promoter in generating vector HA-SL-IL-6-1 (SEQ ID NO: 78). To construct pCR-SL3, the MCS region in pSC65 was PCR amplified with the primers:

[0385] SL5:

[0386] 5′-TAGAGCTCTTTTTTTTTTTTTTTTTTTT GGCATATAAATAAGTCGA CAGATCTAGGCCTG-3′ (SEQ ID NO: 37), containing the sequence for synthetic late promoter P_{SL} (SEQ ID NO: 38), and

[0387] SEL3:

[0388] 5′-TAGAGCTCTCCAGACATTGTTGAATTAG-3′) (SEQ ID NO: 32). The resulting PCR product was cloned into the TA cloning site of vector pCR2.1 to yield pCR-SL3 (SEQ ID NO: 39).

[0389] To generate vector HA-SL-IL-6-1, the sIL-6R/IL-6 fusion cDNA molecule (SEQ ID NO: 106) was released from vector pCRII-IL6-3 (see (h) above; SEQ ID NO: 73) by KpnI and SalI restriction enzyme digest and inserted into vector pCR-SL3 (SEQ ID NO: 39), precut with SalI and SmaI to generate plasmid pCR-SL-IL6-2 (SEQ ID NO: 75), thus placing the IL-6 fusion cDNA under the control of vaccinia virus synthetic late (SL) promoter.

[0390] The cDNA of SL-sIL-6R/IL-6 was released from pCR-SL-IL6-2 (SEQ ID NO: 75) by HindIII and BamHI restriction enzyme digest and inserted into the HA transfer vector, pNCVVhaT (SEQ ID NO: 4), precut with HindIII and BamHI to generate plasmid HA-SL-IL6-1 (SEQ ID NO: 78). The SL-sIL-6R/IL-6 fusion expression cassette was confirmed by sequencing.

[0391] k. FSE-IL-24: for Insertion of an Expression Cassette Encoding IL-24 Under the Control of the Vaccinia P_{SE} Promoter into the Vaccinia F14.5L Locus.

[0392] Vector FSE-IL-24 (SEQ ID NO: 84) was employed to develop strain GLV-1h96 having the following genotype: F14.5L: (P_{SE})IL-24, TK: (P_{SEL})rTrfR-(P_{7.5k})LacZ, HA: (P₁₁ₖ)gusA. Strain GLV-1h96 was generated by inserting DNA encoding human IL-24 operably linked to the vaccinia virus synthetic early promoter (P_{SE}) (SEQ ID NO: 35) into the F14.5L locus of strain GLV-1h68, thereby deleting the Ruc-GFP fusion gene expression cassette at the F14.5L locus of GLV-1h68. Vector FSE-IL-24 contains a DNA fragment encoding the IL-24 protein operably linked to the vaccinia synthetic early promoter (P_{SE}) and sequences of the F14.5L gene flanking the (P_{SE})-fusion protein-encoding DNA fragment.

[0393] Plasmid pCR-SE1 (SEQ ID NO: 36; see (h) above for description of pCR-SE1), containing the vaccinia synthetic early promoter, i.e., P_{SE}, was used as the source of the vaccinia synthetic early promoter in generating vector FSE-IL-24.

[0394] To generate vector FSE-IL-24, cDNA encoding the human IL-24 was PCR amplified from cDNA clone MGC:8926 (complete cds from Origene Trueclone collection) with the primers:

(SEQ ID NO: 64)
5′-GTCGACCACCATGAATTTTCAACAGAGGCTGC-3′
and
(SEQ ID NO: 65)
5′-CCCGGGTTATCAGAGCTTGTAGAATTTCTGCATC-3′.

[0395] The PCR product was cloned into vector pCR-Blunt II-TOPO (Invitrogen; SEQ ID NO: 40) to yield pCR11-IL24-3 (SEQ ID NO: 80). After confirming the sequence, the IL-24 cDNA molecule (SEQ ID NO: 107) was released by SalI and SmaI digestion and inserted into vector pCR-SE1 (SEQ ID NO: 36), precut with SalI and SmaI to generate plasmid pCR-SE-IL24-2 (SEQ ID NO: 81), thus placing the IL-24 cDNA under the control of vaccinia virus synthetic early (SE) promoter.

[0396] The cDNA of SE-IL24 was released from pCR-SE-IL24-2 (SEQ ID NO: 81) by HindIII and BamHI restriction enzyme digest and inserted into the F14.5L transfer vector, pNCVVf14.51T (SEQ ID NO: 11), precut with HindIII and BamHI to generate plasmid FSE-IL24-1 (SEQ ID NO: 84). The SL-IL-24 expression was confirmed by sequencing.

[0397] l. FSEL-IL-24: for Insertion of an Expression Cassette Encoding IL-24 Under the Control of the Vaccinia P_{SEL} Promoter into the Vaccinia F14.5L Locus.

[0398] Vector FSEL-IL24-1 (SEQ ID NO: 86) was employed to develop strain GLV-1h97 having the following genotype: F14.5L: (P_{SEL})IL-24, TK: (P_{SEL})rTrfR-(P_{7.5k})LacZ, HA: (P₁₁ₖ)gusA. Strain GLV-1h97 was generated by inserting DNA human IL-24 operably linked to the vaccinia virus synthetic early/late promoter (P_{SEL}) (SEQ ID NO: 29) into the F14.5L locus of strain GLV-1h68, thereby deleting the Ruc-GFP fusion gene expression cassette at the F14.5L locus of GLV-1h68. Vector FSEL-IL24-1 contains a DNA fragment encoding the IL-24 protein operably linked to the vaccinia synthetic early/late promoter (P_{SEL}), sequences of the F14.5L gene flanking the (P_{SEL})-fusion protein-encoding DNA fragment, the E. coli guanine phosphoribosyltransferase (gpt) gene under the control of the vaccinia virus P7.5k early and late promoter for transient dominant selection of virus that has incorporated the vector, and sequences of the pUC plasmid.

[0399] Plasmid pCR-SEL4 (SEQ ID NO: 33; see (f) above for construction of pCR-SEL4), containing the vaccinia synthetic early/late promoter, i.e., P_{SEL}, was used as the source of the vaccinia synthetic early/late in generating vector FSEL-IL24-1.

[0400] To generate vector FSEL-IL24-1, the IL-24 cDNA molecule (SEQ ID NO: 107) was released from vector pCRII-IL24-3 (see (n) above; SEQ ID NO: 80) by KpnI and SalI restriction enzyme digest and inserted into vector pCR-SEL4 (SEQ ID NO: 33), precut with SalI and SmaI to generate plasmid pCR-SEL-IL24-2 (SEQ ID NO: 83), thus placing the IL-6 fusion cDNA under the control of vaccinia virus synthetic early/late (SEL) promoter.

[0401] The cDNA of SEL-IL24 was released from pCR-SEL-IL24-2 (SEQ ID NO: 83) by HindIII restriction enzyme digest and inserted into the F14.5L transfer vector, pNCVVf14.51T (SEQ ID NO: 11), precut with HindIII to generate plasmid FSEL-IL24-1 (SEQ ID NO: 86). The SEL-IL-24 expression cassette was confirmed by sequencing.

[0402] m. FSL-IL-24: for Insertion of an Expression Cassette Encoding IL-24 Under the Control of the Vaccinia P_{SL} Promoter into the Vaccinia F14.5L Locus.

[0403] Vector FSL-IL24-1 (SEQ ID NO: 85) was employed to develop strain GLV-1h98 having the following genotype: F14.5L: (P_{SL})IL-24, TK: (P_{SEL})rTrJR-(P_{7.5k})LacZ, HA: (P₁₁ₖ)gusA. Strain GLV-1h98 was generated by inserting DNA encoding the human IL-24 protein operably linked to the vaccinia virus synthetic late promoter (P_{SL}) (SEQ ID NO: 38) into the F14.5L locus of starting strain GLV-1h68, thereby deleting the Ruc-GFP fusion gene expression cassette at the F14.5L locus of GLV-1h68. Vector FSL-IL24-1 contains a DNA fragment encoding the IL-24 protein operably linked to the vaccinia synthetic late promoter (P_{SL}) and sequences of the F14.5L gene flanking the (P_{SL})-fusion protein-encoding DNA fragment.

[0404] Plasmid pCR-SL3 (SEQ ID NO: 39; see (j) above for description of pCR-SL3), containing the vaccinia synthetic late promoter, i.e., P_{SL}, was used as the source of the vaccinia synthetic late promoter in generating vector FSL-IL24-1.

[0405] To generate vector FSL-IL24-1, the IL-24 cDNA molecule (SEQ ID NO: 107) was released from vector pCRII-IL24-3 (see (n) above; SEQ ID NO: 80) by KpnI and SalI restriction enzyme digest and inserted into vector pCR-SL3 (SEQ ID NO: 39), precut with SalI and SmaI to generate plasmid pCR-SL-IL24-2 (SEQ ID NO: 82), thus placing the IL-24 fusion cDNA under the control of vaccinia virus synthetic late (SL) promoter.

[0406] The cDNA of SL-IL-24 was released from pCR-SL-IL24-2 (SEQ ID NO: 82) by HindIII and BamHI restriction enzyme digest and inserted into the F14.5L transfer vector, pNCVVf14.51T (SEQ ID NO: 11), precut with HindIII and BamHI to generate plasmid FSL-IL24-1 (SEQ ID NO: 85). The SL-IL-24 expression cassette was confirmed by sequencing.

[0407] n. pCR-TK-SE-tTF-RGD: for Insertion of an Expression Cassette Encoding the tTF-RGD Fusion Protein Under the Control of the Vaccinia P_{SE} Promoter into the Vaccinia TK Locus

[0408] Vector pCR-TK-SE-tTF-RGD (SEQ ID NO: 95) was employed to develop strain GLV-1h104 having the following genotype: F14.5L: (P_{SEL})Ruc-GFP; TK: (P_{SE})tTF-RGD; HA: (P₁₁ₖ)gusA. Strain GLV-1h104 was generated by inserting DNA encoding a tTF-RGD fusion protein (SEQ ID NO: 92 (DNA sequence); SEQ ID NO: 93 (amino acid sequence)) into the TK locus of strain GLV-1h68 thereby deleting the rTrfR-LacZ expression cassette at the TK locus of strain GLV-1h68. Vector pCR-TK-SE-tTF-RGD contains a DNA fragment encoding the tTF-RGD fusion protein operably linked to the vaccinia synthetic early promoter (P_{SE}), sequences of the TK gene flanking the (P_{SE})-fusion protein-encoding DNA fragment, the E. coli guanine phosphoribosyltransferase (gpt) gene under the control of the vaccinia virus P7.5k early and late promoter for transient dominant selection of virus that has incorporated the vector, and sequences of the pUC plasmid.

[0409] cDNA encoding human tissue factor (huTF) was synthesized from RNA extracted from MCF-7 cells (Qiagen RNA extraction kit). The huTF cDNA was synthesized from the RNA in a reverse transcriptase reaction (Invitrogen Superscript II cDNA synthesis kit) using primer hu-tTF-RGD-rev-cDNA, which binds to a region upstream of the huTF sequence:

hu-tTF-RGD-rev-cDNA

| | |
|---|---|
| 5′-CTTTCTACACTTGTGTAGAGATATAGC-3′ | (SEQ ID NO: 91) |

[0410] After cDNA synthesis, the tTF-RGD fragment was PCR amplified (Invitrogen Accu Prime pa Supermix) using hu-TF cDNA as a template and the following primers:

[0411] hu-tTF-RGD-for (SalI)

[0412] 5′-GTCGACCCACCATGGAGACCCCTGCCTG-3′ (SEQ ID NO: 115) and

[0413] hu-tTF-RGD-rev (PacI)

[0414] 5′-TTAATTAATATTATGGAGAATCACCTCTTCCTCTGAATTCCCCTT TCTCCTGG-3′ (SEQ ID NO: 116). The hu-tTF-RGD-rev primer contains additional restriction endonuclease sites and the sequence of the RGD binding motif.

[0415] The PCR product was cloned into vector pCR-Blunt II-TOPO (Invitrogen; SEQ ID NO: 40) via blunt end ligation (Quick Ligation Kit; New England Biolabs) to yield pCRII-tTF-RGD (SEQ ID NO: 94). The tTF-RGD cDNA molecule (SEQ ID NO: 92) was confirmed by sequencing.

[0416] The vaccinia synthetic early promoter, i.e., P_{SE}, and flanking TK gene regions of pCR-TK-SE-tTF-RGD are derived from an intermediate plasmid, TK-SE-CSF-2 (SEQ ID NO: 110), which contains the cDNA for GM-CSF under the control of the vaccinia synthetic early promoter flanked by the TK gene regions. pCR-SE1 (SEQ ID NO: 36; see (h) above for description of pCR-SE1), containing the vaccinia synthetic early promoter, i.e., P_{SE}, was used as the source of the vaccinia synthetic early promoter in generating vector TK-SE-CSF-2. The cDNA encoding GM-CSF protein (mouse granulocyte-macrophage colony-stimulating factor) was PCR amplified from pPICZA-mGM-CSF (SEQ ID NO: 72) with the primers GM-CSF5 5′-CTAGTCGACATGTGGCTGCAGAATTTACTTTTCCTGGGCATTGTGGTCT ACAGCCTCTCAGCACCCACCCGCTCACCCATC-3′ (SEQ ID NO: 70), containing the signal peptide sequence, and

[0417] GM-CSF3

[0418] 5′-GGGTCATTTTTGGACTGGTTTTT-3′ (SEQ ID NO: 71), containing a stop codon. The PCR amplification product was cloned into vector pCR-Blunt II-TOPO (SEQ ID NO: 40; Invitrogen, Carlsbad, Calif.). The resulting vector pCRII-CSF9 (SEQ ID NO: 108), which contained the correct insert, was digested with SalI and EcoRI (blunt-ended after digestion), and the released GM-CSF cDNA was cloned into vector pCR-SE1 (SEQ ID NO: 36) precut with SalI and SmaI, resulting in SE-CSF-2 (SEQ ID NO: 109). Thus, SE-CSF-2 contains the vaccinia synthetic early promoter (P_{SE}) operably linked to DNA encoding GM-CSF. The GM-CSF expression cassette containing GM-CSF cDNA under the control of the P_{SE} was excised from SE-CSF-2 by SacI digestion and cloned into the same-cut vector pCR-TKLR-gpt2 (SEQ ID NO: 17) to generate the construct TK-SE-CSF-2 (SEQ ID NO: 110). This cloning step places the (P_{SE})GM-CSF expression cassette between the left and right TK gene flanking sequences in pCR-TKLR-gpt2 and eliminates the non-coding DNA that is located between these flanking sequences in pCR-TKLR-gpt2.

[0419] To generate vector pCR-TK-SE-tTF-RGD, the tTF-RGD fragment was released by SalI and PacI restriction enzyme digest of pCRII-tTF-RGD (SEQ ID NO: 94) and inserted into TK-SE-CSF-2 (SEQ ID NO: 110), precut with SalI and Pad, to generate plasmid pCR-TK-SE-tTF-RGD (SEQ ID NO: 95), thus placing the tTF-RGD cDNA under the control of vaccinia virus synthetic early (P_{SE}) promoter and in between the left and right TK gene flanking sequences. The tTF-RGD cDNA insert was confirmed by sequencing.

[0420] o. pCR-TK-SEL-tTF-RGD: for Insertion of an Expression Cassette Encoding the tTF-RGD Fusion Protein Under the Control of the Vaccinia P_{SEL} Promoter into the Vaccinia TK Locus

[0421] Vector pCR-TK-SEL-tTF-RGD (SEQ ID NO: 96) was employed to develop strain GLV-1h105 having the following genotype: F14.5L: (P_{SEL})Ruc-GFP; TK: (P_{SEL})tTF-RGD; HA: (P₁₁ₖ)gusA. Strain GLV-1h105 was generated by inserting DNA encoding a tTF-RGD fusion protein (SEQ ID NO: 92) into the TK locus of strain GLV-1h68 thereby deleting the rTrfR-LacZ expression cassette at the TK locus of strain GLV-1h68. Vector pCR-TK-SEL-tTF-RGD contains a DNA fragment encoding the tTF-RGD fusion protein operably linked to the vaccinia synthetic early/late promoter (P_{SEL}), sequences of the TK gene flanking the (P_{SEL})-fusion protein-encoding DNA fragment, the E. coli guanine phosphoribosyltransferase (gpt) gene under the control of the vaccinia virus P7.5k early and late promoter for transient dominant selection of virus that has incorporated the vector and sequences of the pUC plasmid.

[0422] The vaccinia synthetic early/late promoter, i.e., P_{SEL}, and flanking TK gene regions of pCR-TK-SEL-tTF-RGD are derived from an intermediate plasmid, TK-SEL-CSF-2 (SEQ ID NO: 112), which contains the cDNA for GM-CSF under the control of the vaccinia synthetic early/late promoter flanked by the TK gene regions. Plasmid pCR-SEL4 (SEQ ID NO: 33; see (f) above for construction of pCR-SEL4), containing the vaccinia synthetic early/late promoter, i.e., P_{SEL}, was used as the source of the vaccinia synthetic early/late in generating vector TK-SEL-CSF-2. DNA encoding GM-CSF was excised from pCRII-CSF9 (SEQ ID NO: 108) with SalI and EcoRI (blunt-ended after digestion), and cloned into vector pCR-SEL4 (SEQ ID NO: 33) precut with SalI and SmaI, resulting in SEL-CSF-2 (SEQ ID NO: 111). Thus, SEL-CSF-2 contains the vaccinia synthetic early/late promoter (P_{SEL}) operably linked to DNA encoding GM-CSF. The GM-CSF expression cassette containing DNA encoding GM-CSF under the control of P_{SEL} was then excised from SEL-CSF-2 by SacI digestion and cloned into the same-cut vector pCR-TKLR-gpt2 (SEQ ID NO: 17) to generate the construct TK-SEL-CSF-2 (SEQ ID NO: 112). This cloning step places the (P_{SEL})GM-CSF expression cassette between the left and right TK gene flanking sequences in pCR-TKLR-gpt2 and eliminates the non-coding DNA that is located between these flanking sequences in pCR-TKLR-gpt2.

[0423] To generate vector pCR-TK-SEL-tTF-RGD, the tTF-RGD fragment was released by SalI and PacI restriction enzyme digest of pCRII-tTF-RGD (see (n) above; SEQ ID NO: 94) and inserted into TK-SEL-CSF-2 (SEQ ID NO: 112), precut with SalI and PacI to generate plasmid pCR-TK-SEL-tTF-RGD (SEQ ID NO: 96), thus placing the tTF-RGD cDNA under the control of vaccinia virus synthetic early/late (P_{SEL}) promoter and in between the left and right TK gene flanking sequences. The tTF-RGD cDNA insert was confirmed by sequencing.

[0424] p. pCR-TK-SL-tTF-RGD: for Insertion of an Expression Cassette Encoding the tTF-RGD Fusion Protein Under the Control of the Vaccinia P_{SL} Promoter into the Vaccinia TK Locus

[0425] Vector pCR-TK-SL-tTF-RGD (SEQ ID NO: 97) was employed to develop strain GLV-1h106 having the following genotype: F14.5L: (P_{SEL})Ruc-GFP; TK: (P_{SL})tTF-RGD; HA: (P₁₁ₖ)gusA. Strain GLV-1h106 was generated by inserting DNA encoding a tTF-RGD fusion protein (SEQ ID NO: 92) into the TK locus of strain GLV-1h68 thereby deleting the rTrfR-LacZ expression cassette at the TK locus of strain GLV-1h68. Vector pCR-TK-SL-tTF-RGD contains a DNA fragment encoding the tTF-RGD fusion protein operably linked to the vaccinia synthetic late promoter (_{SL}), sequences of the TK gene flanking the (P_{SL})-fusion protein-encoding DNA fragment, the E. coli guanine phosphoribosyltransferase (gpt) gene under the control of the vaccinia virus P7.5k early and late promoter for transient dominant selection of virus that has incorporated the vector, and sequences of the pUC plasmid.

[0426] The vaccinia synthetic late promoter, i.e., P_{SL}, and flanking TK gene regions of pCR-TK-SL-tTF-RGD are derived from an intermediate plasmid, TK-SL-CSF-2 (SEQ ID NO: 114), which contains the cDNA for GM-CSF under the control of the vaccinia synthetic late promoter flanked by the TK gene regions.

[0427] Plasmid pCR-SL3 (SEQ ID NO: 39; see (j) above for description of pCR-SL3), containing the vaccinia synthetic late promoter, i.e., P_{SL}, was used as the source of the vaccinia synthetic late promoter in generating vector TK-SL-CSF-3 (SEQ ID NO: 114). DNA encoding mouse GM-CSF was excised from pCRII-CSF9 (SEQ ID NO: 108) with SalI and EcoRI (blunt-ended after digestion), and cloned into vector pCR-SL3 (SEQ ID NO: 39) precut with SalI and SmaI, resulting in SL-CSF-2 (SEQ ID NO: 113). Thus, SL-CSF-2 contains the vaccinia synthetic late promoter (P_{SL}) operably linked to DNA encoding GM-CSF. The GM-CSF expression cassette containing DNA encoding GM-CSF under the control of the PSL was excised out from SL-CSF-2 by Sac I and cloned into the same-cut vector pCR-TKLR-gpt2 (SEQ ID NO: 17) to generate the construct TK-SL-CSF-3 (SEQ ID NO: 114). This cloning step places the (P_{SL})GM-CSF expression cassette between the left and right TK gene flanking sequences in pCR-TKLR-gpt2 and eliminates the non-coding DNA that is located between these flanking sequences in pCR-TKLR-gpt2.

[0428] To generate vector pCR-TK-SL-tTF-RGD, the tTF-RGD fragment was released by SalI and PacI restriction enzyme digest of pCR11-tTF-RGD (see (n) above; SEQ ID NO: 94) and inserted into TK-SL-CSF-3 (SEQ ID NO: 114), precut with SalI and PacI to generate plasmid pCR-TK-SL-tTF-RGD (SEQ ID NO: 97), thus placing the tTF-RGD cDNA under the control of vaccinia virus synthetic late (P_{SL}) promoter and in between the left and right TK gene flanking sequences. The tTF-RGD cDNA insert was confirmed by sequencing.

[0429] q. pCR-TK-SE-G6-FLAG: for Insertion of an Expression Cassette Encoding the G6-FLAG Fusion Protein Under the Control of the Vaccinia P_{SE} Promoter into the Vaccinia TK Locus

[0430] Vector pCR-TK-SE-G6-FLAG (SEQ ID NO: 100) was employed to develop strain GLV-1h107 having the following genotype: F14.5L: (P_{SEL})Ruc-GFP; TK: (P_{SE}) G6-FLAG; HA: (P₁₁ₖ)gusA. Strain GLV-1h107 was generated by inserting DNA encoding a G6-FLAG fusion protein (SEQ ID NO: 99; G6 is the anti-VEGF scAb) into the TK locus of strain GLV-1h68 thereby deleting the rTrfR-LacZ expression cassette at the TK locus of strain GLV-1h68. Vector pCR-TK-SE-G6-FLAG contains a DNA fragment encoding the G6-FLAG fusion protein operably linked to the vaccinia synthetic early promoter (P_{SE}), sequences of the TK gene flanking the (P_{SE})-fusion protein-encoding DNA fragment, the E. coli guanine phosphoribosyltransferase (gpt) gene under the control of the vaccinia virus P7.5k early and late promoter for transient dominant selection of virus that has incorporated the vector, and sequences of the pUC plasmid.

[0431] cDNA encoding G6-FLAG was obtained from vector pGA4-G6 (GeneArt; SEQ ID NO: 98). The vector contains DNA encoding an artificially synthesized single chain antibody (scAb) directed against VEGF (scFv anti-VEGF). The gene encodes the kappa light chain leader sequence for the secretion of the protein, the sequence of the V_{H} domain of the scAb followed by a linker sequence and the sequence of the V_{L} domain of the scAb. The C-terminal end of the gene is fused to DNA encoding a FLAG-tag for ease of protein detection. The 5′ end the G6-FLAG fragment contains a SalI site, and the 3′ end contains a PacI site.

[0432] To generate vector pCR-TK-SE-G6-FLAG, the G6-FLAG fragment was released by SalI and PacI restriction enzyme digest of pGA4-G6 (SEQ ID NO: 98) and inserted into TK-SE-CSF-2 (see (n) above; SEQ ID NO: 110), precut with SalI and PacI, to generate plasmid pCR-TK-SE-G6-FLAG (SEQ ID NO: 100), thus placing the G6-FLAG cDNA under the control of vaccinia virus synthetic early (P_{SE}) promoter and in between the left and right TK gene flanking sequences. The G6-FLAG cDNA insert was confirmed by sequencing.

[0433] r. pCR-TK-SEL-G6-FLAG: for Insertion of an Expression Cassette Encoding the G6-FLAG Fusion Protein Under the Control of the Vaccinia P_{SEL} Promoter into the Vaccinia TK Locus

[0434] Vector pCR-TK-SEL-G6-FLAG (SEQ ID NO: 101) was employed to develop strain GLV-1h108 having the following genotype: F14.5L: (P_{SEL})Ruc-GFP; TK: (P_{SEL})G6-FLAG; HA: (P₁₁ₖ)gusA. Strain GLV-1h108 was generated by inserting DNA encoding a G6-FLAG fusion protein (SEQ ID NO: 99) into the TK locus of strain GLV-1h68 thereby deleting the rTrfR-LacZ expression cassette at the TK locus of strain GLV-1h68. Vector pCR-TK-SEL-G6-FLAG contains a DNA fragment encoding the G6-FLAG fusion protein operably linked to the vaccinia synthetic early/late promoter (P_{SEL}), sequences of the TK gene flanking the (P_{SEL})-fusion protein-encoding DNA fragment, the E. coli guanine phosphoribosyltransferase (gpt) gene under the control of the vaccinia virus P7.5k early and late promoter for transient dominant selection of virus that has incorporated the vector, and sequences of the pUC plasmid.

[0435] To generate vector pCR-TK-SEL-G6-FLAG, the G6-FLAG fragment was released by SalI and PacI restriction enzyme digest of pGA4-G6 (see (t) above; SEQ ID NO: 98) and inserted into TK-SEL-CSF-2 (see (o) above; SEQ ID NO: 112), precut with SalI and Pad, to generate plasmid pCR-TK-SEL-G6-FLAG (SEQ ID NO: 101), thus placing the tTF-RGD cDNA under the control of vaccinia virus synthetic early/late (P_{SEL}) promoter and in between the left and right TK gene flanking sequences. The G6-FLAG cDNA insert was confirmed by sequencing.

[0436] s. pCR-TK-SL-G6-FLAG: for Insertion of an Expression Cassette Encoding the G6-FLAG Fusion Protein Under the Control of the Vaccinia P_{SL} Promoter into the Vaccinia TK Locus

[0437] Vector pCR-TK-SL-G6-FLAG (SEQ ID NO: 102) was employed to develop strain GLV-1h109 having the following genotype: F14.5L: (P_{SEL})Ruc-GFP; TK: (P_{SL}) G6-FLAG; HA: (P₁₁ₖ)gusA. Strain GLV-1h109 was generated by inserting DNA encoding a G6-FLAG fusion protein (SEQ ID NO: 99) into the TK locus of strain GLV-1h68 thereby deleting the rTrfR-LacZ expression cassette at the TK locus of strain GLV-1h68. Vector pCR-TK-SL-G6-FLAG contains a DNA fragment encoding the G6-FLAG fusion protein operably linked to the vaccinia synthetic late promoter (P_{SL}), sequences of the TK gene flanking the (P_{SL})-fusion protein-encoding DNA fragment, the E. coli guanine phosphoribosyltransferase (gpt) gene under the control of the vaccinia virus P7.5k early and late promoter for transient dominant selection of virus that has incorporated the vector, and sequences of the pUC plasmid.

[0438] To generate vector pCR-TK-SL-G6-FLAG, the G6-FLAG fragment was released by SalI and Pad restriction enzyme digest of pGA4-G6 (see (t) above; SEQ ID NO: 98) and inserted into TK-SL-CSF-3 (see (p) above; SEQ ID NO: 114), precut with SalI and PacI to generate plasmid pCR-TK-SL-G6-FLAG (SEQ ID NO: 102), thus placing the G6-FLAG cDNA under the control of vaccinia virus synthetic late (P_{SL}) promoter and in between the left and right TK gene flanking sequences. The G6-FLAG cDNA insert was confirmed by sequencing.

[0439] t. pF14.5-SEL-RG: for Insertion of an Expression Cassette Encoding the Ruc-GFP Fusion Protein Under the Control of the Vaccinia P_{SEL} Promoter into the Vaccinia F14.5L Locus

[0440] pF14.5-SEL-RG (SEQ ID NO: 104) is a targeting vector that can be employed to facilitate insertion of foreign genes in the F14.5L locus of LIVP.

[0441] The ruc-gfp fusion cDNA from pcDNA-RG (see, for example, Wang et al., 2002) was amplified by PCR using AccuPrime pfx SuperMix (Invitrogen), using primer that comprise the vaccinia synthetic early/late promoter (P_{SEL}), which places the ruc-gfp under the control of P_{SEL} promoter:

(SEQ ID NO: 117)
5′-ATCAAGCTTAAAAATTGAAATTTTATTTTTTTTTTTTGGAATATA
AATGACTTCGAAAGTTTATGATCCAGAAC-3′
and
(SEQ ID NO: 118)
5′-TCACTTGTACAGCTCGTCCA-3′.

[0442] The resulting PCR product was cloned into pCR-Blunt II-TOPO vector (Invitrogen; SEQ ID NO: 40) to yield pCRII-SEL-RG (SEQ ID NO: 105). The vector was sequence confirmed.

[0443] To generate vector pF14.5-SEL-RG, the SEL-RG cDNA fragment was released from pCRII-SEL-RG (SEQ ID NO: 105) by Hind III and EcoR V restriction enzyme digest and inserted into pNCVVf14.51T (SEQ ID NO: 11), precut with Hind III and BamH I (blunt ended) to generate plasmid pF14.5-SEL-RG (SEQ ID NO: 104), thus placing the Ruc-GFP fusion cDNA under the control of vaccinia virus synthetic early/late (P_{SEL}) promoter and in between the left and right F14.5L gene flanking sequences.

[0444] u. FSE-hNET: for Insertion of an Expression Cassette Encoding hNET Under the Control of the Vaccinia P_{SE} Promoter into the Vaccinia F14.5L Locus

[0445] The FSE-hNET vector (SEQ ID NO.: 119) was employed to create vaccinia virus strain GLV-1h99, having the following genotype: F14.5L: (P_{SE})hNET, TK: (P_{SEL})rTrfR-(P_{7.5k})LacZ, HA: (P₁₁ₖ)gusA. FSE-hNET contains the human norepinephrine transporter (hNET) under the control of the vaccinia P_{SE} promoter, flanked by sequences of the F14.5L gene.

[0446] To generate the FSE-hNET vector, DNA encoding hNET was PCR amplified from the plasmid pBluescript II KS+-hNET as the template with the following primers:

hNET5 (5′-GTCGACGCCACCATGCTTCTGGCGCGGATGAA-3′, SEQ ID NO: 120) (Sal I restriction site underlined) and hNET3 (5′-GATATCTCAGATGGCCAGCCAGTGTT-3′, SEQ ID NO: 121) (EcoR V site underlined). The PCR product was gel-purified, and cloned into the pCR-Blunt II-TOPO vector (SEQ ID NO: 122) using the Zero Blunt TOPO PCR Cloning Kit (Invitrogen). The resulting construct pCRII-hNET1 confirmed by sequencing. The hNET cDNA was released from pCRII-hNET1 with Sal I and EcoR V enzyme digest, and subcloned into the intermediate vector pCR-SE1 (SEQ ID NO: 123), precut with SalI and SmaI. This step puts hNET cDNA downstream of the sequence for vaccinia virus synthetic early promoter (P_{SE}). The viral hNET expression cassette (SE-hNET) was released from this intermediate construct by BamH I and Hind III enzyme digest, and inserted into the same cut viral transfer vector pNCVVf14.5T (SEQ ID NO: 124). The final construct FSE-hNET1 was confirmed by sequencing and used for insertion of SE-hNET into the F14.5L locus in GLV-1h68.

[0447] v. TK-SE-hNET3: for Insertion of an Expression Cassette Encoding hNET Under the Control of the Vaccinia P_{SE} Promoter into the Vaccinia TK Locus

[0448] The TK-SE-hNET3 vector (SEQ ID NO.: 125) was employed to create vaccinia virus strain GLV-1h100, having the following genotype: F14.5L: (P_{SEL})Ruc-GFP, TK: (P_{SE})hNET, HA: (P₁₁ₖ)gusA. TK-SE-hNET3 contains the human norepinephrine transporter (hNET) under the control of the vaccinia P_{SE} promoter, flanked by sequences of the TK gene. To generate vector TK-SE-hNET3, hNET cDNA was released from FSE-hNET1 with Sal I and Pac I enzyme digestion, and inserted into same cut vector TK-SE-mIP10 (SEQ ID NO: 126). The resulting construct TK-SE-hNET3 was confirmed by sequencing.

[0449] w. TK-SL-hNET3: for Insertion of an Expression Cassette Encoding hNET Under the Control of the Vaccinia P_{SL} Promoter into the Vaccinia TK Locus

[0450] The TK-SL-hNET3 vector (SEQ ID NO.: 127) was employed to create vaccinia virus strain GLV-1h101, having the following genotype: F14.5L: (P_{SEL})Ruc-GFP, TK: (P_{SL})hNET, HA: (P₁₁ₖ)gusA. TK-SE-hNET3 contains the human norepinephrine transporter (hNET) under the control of the vaccinia P_{SL} promoter, flanked by sequences of the TK gene. To generate vector TK-SL-hNET3, hNET cDNA was released from FSE-hNET1 with Sal I and Pac I enzyme digestion, and inserted into same cut vector TK-SL-mIP10 (SEQ ID NO: 128). The resulting construct TK-SL-hNET3 was confirmed by sequencing.

[0451] x. HA-SE-hNET-1: for Insertion of an Expression Cassette Encoding hNET Under the Control of the Vaccinia P_{SE} Promoter into the Vaccinia HA Locus

[0452] The HA-SE-hNET-1 vector (SEQ ID NO: 129) was employed to create vaccinia virus strain GLV-1h139, having the following genotype: F14.5L: (P_{SEL})Ruc-GFP, TK: (P_{SEL})rTrfR-(P_{7.5k})LacZ, HA: (P_{SE})hNET. HA-SE-hNET-1 contains the human norepinephrine transporter (hNET) under the control of the vaccinia P_{SE} promoter, flanked by sequences of the HA gene. To generate vector HA-SE-hNET-1, hNET cDNA was released from TK-SL-hNET-3 (SEQ ID NO.: 127) by Sal I and Pac I enzyme digest, and subcloned into same cut vector HA-SE-RLN-7 (SEQ ID NO.: 130), thereby replacing RLN cDNA with the hNET cDNA. The resulting construct HA-SE-hNET-1 was confirmed by sequencing.

[0453] y. HA-SE-IL24-1: for Insertion of an Expression Cassette Encoding IL-24 Under the Control of the Vaccinia P_{SE} Promoter into the Vaccinia HA Locus

[0454] The HA-SE-IL24-1 vector (SEQ ID NO.: 131) was employed to create vaccinia virus strains GLV-1h146 and GLV-1h150, having the following genotypes: F14.5L: (P_{SEL})Ruc-GFP, TK: (P_{SE})hNET, HA: (P_{SE})IL-24 and F14.5L: (P_{SEL})Ruc-GFP, TK: (P_{SL})hNET, HA: (P_{SE})IL-24, respectively. HA-SE-IL24-1 contains the human IL-24 gene under the control of the vaccinia P_{SE} promoter, flanked by sequences of the HA gene. To generate vector HA-SE-IL24-1, human IL24 cDNA was PCR amplified using Homo sapiens interleukin 24, transcript variant 1 (cDNA clone MGC:8926) from Origene as the template with the following primers:

mda-5 (5′-GTCGACCACCATGAATTTTCAACAGAGGCTGC-3′, SEQ ID NO.: 132) (Sal I site underlined) and
mda-3 (5′-CCCGGGTTATCAGAGCTTGTAGAATTTCTGCATC-3′, SEQ ID NO.: 133) (Sma I site underlined)). The resulting PCR product was gel purified, and cloned into the pCR-Blunt II-TOPO vector (SEQ ID NO.: 122), using Zero Blunt TOPO PCR Cloning Kit (Invitrogen). The resulting construct pCRII-IL24-3 was sequence confirmed. The IL24 cDNA was released from pCRII-IL24-3 by Sal I and Sma I digest, and subcloned into same cut vector pCR-SE1 (SEQ ID NO.: 123), placing IL24 under the control of vaccinia synthetic promoter (P_{SE}). The resulting construct pCR-SE-IL24-2 was sequence confirmed. The IL24 was then released by Sal I and Pac I enzyme digest, and subcloned into same cut vector HA-SE-RLN-7 (SEQ ID NO.: 130) thereby replacing RLN cDNA with IL-24 cDNA. The resulting constructs HA-SE-IL24-1 was sequence confirmed.

[0455] z. HA-SE-hNIS-1: for Insertion of an Expression Cassette Encoding hNIS Under the Control of the Vaccinia P_{SE} Promoter into the Vaccinia HA Locus

[0456] The HA-SE-hNIS-1 vector (SEQ ID NO.: 134) was employed to create vaccinia virus strain GLV-1h151, having the following genotype: F14.5L: (P_{SEL})Ruc-GFP, TK: (P_{SEL})rTdR-(P_{7.5k})LacZ, HA: (P_{SE})hNIS. HA-SE-hNIS-1 contains the human sodium iodide symporter (hNIS) under the control of the vaccinia P_{SE} promoter, flanked by sequences of the HA gene. To generate vector HA-SE-hNIS-1, hNIS cDNA was PCR amplified using human cDNA clone TC124097 (SLC5A5) from OriGene as the template with following primers:

hNIS-5
SEQ ID NO.: 135
(5′-GTCGACCACCATGGAGGCCGTGGAGACCGG-3′,)
(Sal I site underlined)
and
hNIS-3
SEQ ID NO.: 135
(5′-TTAATTAATCAGAGGTTTGTCTCCTGCTGGTCTCGA-3′,)
(Pac I site underlined).

The PCR product was gel-purified, and cloned into the pCR-Blunt II-TOPO vector (SEQ ID NO.: 122) using Zero Blunt TOPO PCR Cloning Kit (Invitrogen). The resulting construct pCRII-hNIS-2 confirmed by sequencing. The hNIS cDNA was released from pCRII-hNIS-2 with Sal I and Pac I enzyme digestion, and subcloned into same cut vector HA-SE-RLN-7 (SEQ ID NO.: 130), thereby replacing RLN cDNA. The resulting construct HA-SE-hNIS-1 was confirmed by sequencing.

[0457] aa. HA-SEL-hNIS-2: for Insertion of an Expression Cassette Encoding hNIS Under the Control of the Vaccinia P_{SEL} Promoter into the Vaccinia HA Locus

[0458] The HA-SEL-hNIS-2 vector (SEQ ID NO.: 137) was employed to create vaccinia virus strain GLV-1h152, having the following genotype: F14.5L: (P_{SEL})Ruc-GFP, TK: (P_{SEL})rTrfR-(P_{7.5k})LacZ, HA: (P_{SEL})hNIS. HA-SEL-hNIS-2 contains the human sodium iodide symporter (hNIS) under the control of the vaccinia P_{SEL} promoter, flanked by sequences of the HA gene. To generate vector HA-SEL-hNIS-2, the hNIS cDNA was released from pCR11-hNIS-2 with Sal I and Pac I enzyme digestion, and subcloned into same cut vector HA-SEL-RLN-2 (SEQ ID NO.: 138), thereby replacing RLN cDNA. The resulting construct HA-SEL-hNIS-2 was confirmed by sequencing.

[0459] bb. HA-SL-hNIS-1: for Insertion of an Expression Cassette Encoding hNIS Under the Control of the Vaccinia P_{SL} Promoter into the Vaccinia HA Locus

[0460] The HA-SL-hNIS-1 vector (SEQ ID NO.: 139) was employed to create vaccinia virus strain GLV-1h153, having the following genotype: F14.5L: (P_{SEL})Ruc-GFP, TK: (P_{SEL})rTrfR-(P_{7.5k})LacZ, HA: (P_{SL})hNIS. HA-SL-hNIS-1 contains the human sodium iodide symporter (hNIS) under the control of the vaccinia P_{SL} promoter, flanked by sequences of the HA gene. To generate vector HA-SL-hNIS-1, the hNIS cDNA was released from pCRII-hNIS-2 with Sal I and Pac I enzyme digestion, and subcloned into same cut vector HA-SL-RLN-3 (SEQ ID NO.: 140), thereby replacing RLN cDNA. The resulting construct HA-SL-hNIS-1 was confirmed by sequencing.

[0461] 3. Preparation of Recombinant Vaccinia Viruses

[0462] a. GLV-1i69

[0463] CV-1 (African green monkey kidney fibroblast) cells (ATCC No. CCL-70), grown in DMEM (Mediatech, Inc., Herndon, Va.) with 10% FBS, were infected with GLV-1h68 at multiplicity of infection (m.o.i.) of 0.1 for 1 hour, then transfected using Lipofectamine 2000 (Invitrogen, Carlsbad, Calif.) with PCR-amplified A34R (SEQ ID NO: 58) coding sequence from VV IHD-J using the following primers: 5′-CATTAATAAATGAAATCGCTTAATAG-3′ (SEQ ID NO: 59) and 5′-GGCGGCGTACGTTAACGAC-3′ (SEQ ID NO: 60). Recombinant virus was selected based on its comet-like plaque morphology as described below.

[0464] Two days after transfection, the medium was harvested. To enrich the recombinant extracellular enveloped viruses (EEVs) (i.e. to increase the percentage of recombinant EEV within the infected medium), CV-1 cells were infected with the infected/transfected medium. Two days post infection the infected medium was collected. After the fourth round of the enrichment, the infected medium was diluted and used to infect CV-1 cells. Ten well-isolated plaques were picked and purified for a total of three times. Eight of ten isolates formed comet-like plaques under liquid medium.

[0465] b. GLV-1 h and GLV-1j Series

[0466] CV-1 cells, grown in DMEM (Mediatech, Inc., Herndon, Va.) with 10% FBS, were infected with the indicated parental viruses (Table 2) at m.o.i. of 0.1 for 1 hr, then transfected using Lipofectamine 2000 or Fugene (Roche, Indianapolis, Ind.) with 2 μg of the corresponding transfer vector (Table 2). Infected/transfected cells were harvested and the recombinant viruses were selected using a transient dominant selection system and plaque purified using methods known in the art (see, e.g., Falkner and Moss, J. Virol., 64, 3108-3111 (1990)). Isolates were plaque purified five times with the first two rounds of plaque isolation conducted in the presence of mycophenolic acid, xanthine and hypoxanthine which permits growth only of recombinant virus that expressing the selectable marker protein, i.e., E. coli guanine phosphoribosyltransferase (gpt), under the control of the vaccinia P_{7.5kE} promoter. As described herein, each of the transfer vectors used in the generation of the GLV-1 h and GLV-1j series of recombinant vaccinia virus contained a (P_{7.5kE})gpt expression cassette. Thus, growth of the virus in the presence of the selection agents enabled identification of virus in which the first crossover event of homologous recombination between the transfer vector and the parental strain genome had occurred. Subsequent growth of the isolates in the absence of selection agents and further plaque purification yielded isolates that had undergone a second crossover event resulting in deletion of the DNA encoding guanine phosphoribosyltransferase from the genome. This was confirmed by the inability of these isolates to grow in the presence of selection agents.

[0467] 4. Verification of Vaccinia Virus Strain Genotypes

[0468] The genotypes of the modified vaccinia virus strains were verified by PCR and restriction enzyme digestion. The nucleotide sequence of the coding sequence from the IHD-J A34R gene (SEQ ID NO: 58) in GLV-1i69 was further verified by sequencing. Lack of expression of the gusA gene in GLV-1h70, GLV-1h73, GLV-1h74, GLV-1h82, GLV-1h83, GLV-1h84, GLV-1h86, GLV-1h90, GLV-1h91 and GLV-1h92 was confirmed by X-GlcA (5-bromo-4-chloro-3-indolyl-β-D-glucuronic acid) staining of the infected cells. Viruses lacking gusA expression are unable to convert the X-GlcA substrate as indicated by lack of development of blue color in the assay as compared to a control strain (e.g. GLV-1h68). Lack of expression of the GFP gene in GLV-1h71, GLV-1h73, GLV-1h74, GLV-1h84, GLV-1h85, GLV-1h96, GLV-1h97 and GLV-1h98 was confirmed by fluorescence microscopy as compared to a control strain (e.g. GLV-1h68). Lack of expression of β-galactosidase in GLV-1h72, GLV-1h74, GLV-1h81, GLV-1h84, GLV-1h85, GLV-1h86, GLV-1h104, GLV-1h105, GLV-1h106, GLV-1h107, GLV-1h108 and GLV-1h109 was confirmed by X-gal (5-bromo-4-chloro-3-indolyl-β-D-galactopyranoside) staining of the infected cells. Viruses lacking lacZ expression are unable to convert the X-gal substrate as indicated by lack of development of blue color in the assay as compared to a control strain (e.g. GLV-1h68). Standard techniques for X-GlcA and X-gal viral staining and fluorescence microscopy were employed and are well-known in the art.

[0469] Expression of mRFP in GLV-1h84 was confirmed using a Leica DMI 6000 B fluorescence microscope at 2 days post-infection of CV-1 cells and compared to mock infected cells or non-mRFP expression strains (e.g., GLV-1h73). In one example, the GLV-1h84 infected cells expressed over 2.2×10¹⁰ relative light units compared to no expression in the GLV-1h73 strain. Expression of firefly luciferase in GLV-1h84 was confirmed at two days post-infection of CV-1 cells performed using the Chroma-Glo luciferase assay systems (Promega) and relative light units (RLU) were measured using a Turner TD-20e luminometer.

### B. Vaccinia Virus Purification

[0470] Ten T225 flasks of confluent CV-1 cells (seeded at 2×10⁷ cells per flask the day before infection) were infected with each virus at m.o.i. of 0.1. The infected cells were harvested two days post infection and lysed using a glass Dounce homogenizer. The cell lysate was clarified by centrifugation at 1,800 g for 5 min, and then layered on a cushion of 36% sucrose, and centrifuged at 13,000 rpm in a HB-6 rotor, Sorvall RC-5B Refrigerated Superspeed Centrifuge for 2 hours. The virus pellet was resuspended in 1 ml of 1 mM Tris, pH 9.0, loaded on a sterile 24% to 40% continuous sucrose gradient, and centrifuged at 26,000 g for 50 min. The virus band was collected and diluted using 2 volumes of 1 mM Tris, pH 9.0, and then centrifuged at 13,000 rpm in a HB-6 rotor for 60 min. The final virus pellet was resuspended in 1 ml of 1 mM Tris, pH 9.0 and the titer was determined in CV-1 cells (ATCC No. CCL-70).

### Example 2

### Infection of Embryonic Stem Cells with GLV-1h68

[0471] Various human and mouse embryonic stem (ES) cell lines and cell line derivatives and were infected with GLV-1h68 to determine whether the virus could infect and replicate in such cells. The virus was used to infect human HUES-1, HUES-7 and H9 stem cells, and embryoid bodies and blood progenitor cells derived from H9 cells, and murine E14 and J1 ES cells.

[0472] A. Infection of HUES-1 and HUES-7 Cells

[0473] Infection of the human embryonic stem cell lines HUES-1 and HUES-7 (Cowan et al. (2004) N Engl J Med 350(13): 1353-6) was performed on confluent HUES-1 and HUES-7 cells grown in 80% Knockout DMEM (Invitrogen) supplemented with 10% KO-Serum Replacement (INVITROGEN GIBCO CAT#10828-018), 10% Plasmanate (Bayer), 5% fetal calf serum (HYCLONE CAT#SH30070.03), 2 mM Glutamax-I (Invitrogen), 1% non-essential amino acids (Invitrogen), 50 units/mL penicillin and 50 ug/mL streptomycin (Invitrogen), 0.055 mM beta-mercaptoethanol (Gibco), 12 ng/mL recombinant hLIF (Chemicon International), and 5 ng/mL bFGF (Invitrogen) in a 10 cm dish. The cells were infected with 1×10⁵ plaque forming units (PFU) of GLV-1h68 at an estimated multiplicity of infection (MOI) of 0.01. The infected cells and EB were grown at 37° C., 5% CO₂. At 24 and 48 hours post infection, the plaques were imaged using an Olympus 1×71 inverted fluorescence microscope (Olympus Corp., Tokyo, Japan) equipped with a MicroFire True Color Firewire microscope digital charge-coupled device (CCD) camera (Optronics, Goleta, Calif.). Plaques were visualized in HUES-1 and HUES-7 cells at 24 and 48 hours post infection using both phase-contrast imaging and fluorescence imaging (to visualize GLV-1h68-encoded GFP expression), demonstrating that GLV-1h68 infected and replicated in both ES cell lines.

[0474] B. Infection of H9 Cells and Derivatives.

[0475] GLV-1h68 was used to infect the human embryonic stem cell line H9 (Thomson et al. (1998) Science 282(5391): 1145-7.), embyroid bodies (EB) derived from H9 cells and human blood progenitor cells (BC) derived from the EB. H9 cells and EB derived from the H9 cells 3 days after induction (for EB induction, H9 cells were grown in Stemline II medium supplemented with 50 ng/ml of BMP-4 and VEGF for three days) were infected with GLV-1h68 at a MOI of 0.01. Human blood progenitor cells derived from the EB 3 days after induction (for BC induction EB were grown in Methocult SF H4436 medium supplemented with 50 μg/ml of VEGF, BMP-4, TPO and FLT3-L) were infected with GLV-1h68 at a MOI of 0.1. The infected cells and EB were grown at 37° C., 5% CO₂ before being harvested at 24, 48, and 72 hours post infection and the virus titer determined using a standard plaque assay in CV-1 cells. The plaques were imaged using an Olympus 1×71 inverted fluorescence microscope (Olympus Corp., Tokyo, Japan) equipped with a MicroFire True Color Firewire microscope digital charge-coupled device (CCD) camera (Optronics, Goleta, Calif.).

[0476] Plaques were visualized in H9 cells, EB and BC by both phase-contrast imaging and fluorescence imaging (to visualize GLV-1h68-encoded GFP expression), demonstrating that GLV-1h68 infected and replicated in the H9 cells and derivates. Titers of the GLV-1h68 virus also were shown to increase in H9 cells and derivates (Table 3).

TABLE 3
GLV-1h68 titres following infection of H9 cells and derivatives

| | Titre (PFU/10⁶ cells) | | | | | | |
|---|---|---|---|---|---|---|---|
| | | 24 hours post inf. | | 48 hours post inf. | | | |
| | 0 hours | | Std. | | Std. | 72 hours post inf. | |
| | post inf. | Av. | dev. | Av. | dev. | Av. | Std. dev. |
| H9 cells | 1 × 10⁴ | 6.89 × 10³ | 4.28 × 10³ | 4.51 × 10⁵ | 2.99 × 10⁵ | 3.01 × 10⁵ | 5.78 × 10⁴ |
| EB | 1 × 10⁴ | 2.97 × 10³ | 2.15 × 10³ | 7.62 × 10⁴ | 1.24 × 10⁵ | 6.7 × 10⁵ | 1.27 × 10⁵ |
| BC | 1 × 10⁵ | 8.4 × 10⁵ | 7.5 × 10⁵ | 5.3 × 10⁶ | 1.4 × 10⁶ | 1.3 × 10⁷ | 5.6 × 10⁶ |

[0477] C. Infection of E14 and J1 Cells.

[0478] Mouse embryonic stem cell lines E14 (Wakayama et al., (1999) Proc. Natl. Acad. Sci. 96:14984-14989) and J1 (Hailesellasse Sene et al., (2007) BMC Genomics 8:85), both obtained from University of Wuerzburg, Germany, were maintained in DMEM supplemented with 15% fetal calf serum (FCS) (heat inactivated), 2 mM L-glutamine (Gibco BRL), 1× nonessential amino acids (Gibco BRL), 0.1 mM 2-mercaptoethanol (2-ME), 1000 U/ml recombinant leukemia inhibitory factor (LIF), 50 μg/ml streptomycin, and 50 U/ml penicillin. Routine culture was on a feeder layer of mitomycin-C treated primary embryonic fibroblasts. Cells were cultured in feeder-free conditions for at least 1 week before experiments.

[0479] E14 (6.3×10⁶) and J1 (5.1×10⁶) cells were infected with GLV-1h68 virus at MOI of 0.5. After 1 hour infection, the cells were washed twice and replaced with fresh medium. At 0, 20, 30 and 44 hours post infection, the infected ES cultures were imaged using an Olympus 1×71 inverted fluorescence microscope (Olympus Corp., Tokyo, Japan) equipped with a MicroFire True Color Firewire microscope digital charge-coupled device (CCD) camera (Optronics, Goleta, Calif.). Plaques were observed by phase contrast and fluorescence imaging in both cells lines, increasing in number as time progressed, indicating that GLV-1h68 infected and replicated in both E14 and J1 cells.

### Example 3

### Treatment of Teratomas in Rats

[0480] The ability of GLV-1h68 to reduce teratoma size is assessed in rats with spinal traumatic injury or transient spinal chord ischemia that have received ES cell transplantation. The ability of GLV-1h68 to reduce teratoma size also is assessed in rats that have received ES cell transplantation but have no spinal injury or ischemia. Clinical signs of teratoma formation typically is seen between 2-3 weeks after cell grafting and is expressed as progressive loss of ambulatory motor function. Histological analysis of spinal cord in such animals shows consistent presence of spinal parenchymal or subdural/epidural teratoma. The effect of administration of GLV-1h68 at various timepoints after ES cell grafting on teratoma size is assessed.

[0481] A. Induction of Transient Spinal Chord Ischemia

[0482] To induce spinal chord ischemia, adult Sprague Dowley rats are anesthetized using Isoflurane (2-3%) for the entire procedure and body temperature is maintained with a water-heated pad and monitored. A pe-50 catheter is placed in the tail artery for monitoring blood pressure changes. To induce spinal cord ischemia, using aseptic technique, a 1-2 cm cut is made in the lateral thigh and a 2f Fogarty catheter is passed through the left femoral artery to the descending thoracic aorta (approximately 1.5 cm distal to the aortic arch). Baseline data is collected for 15-20 to ensure the animal is stable. The Fogarty balloon catheter is then inflated until arterial pressure drops to approximately 7 mmHg, which is indicative of blood flow occlusion and lower body ischemia. Ischemia is maintained for intervals of 6 to 12 minutes. The balloon is then slowly deflated for reperfusion of spinal cord blood flow, the Fogarty catheter is removed, and the incision is sutured after bupivacaine (0.75%) is infiltrated along the wound edges. During reperfusion (post ischemia), the animal remains lightly anesthetized under Isoflurane anesthesia (approx. 1%), for a period of at least 20 min.

[0483] B. Induction of Spinal Traumatic Injury

[0484] To induce spinal traumatic injury, adult Sprague Dowley rats, a partial laminectomy of S1-2 vertebra is performed in Isoflurane (2%) anesthetized animals. A Fogarty catheter (2 f) is then placed into Th10 epidural space and inflated with 0.05 cc of saline for 1-5 min. After compression of the spinal cord the catheter is removed and the skin incision is closed with 3-0 silk. As paralysis of the bladder is a common complication after spinal injury and is often complicated with urinary infection, animals receive antibiotics (Gentamicin, 5 mg/kg/day, i.m.) for 7 days after injury, and all animals are observed every 12 hours and Crede's maneuver (manual emptying of the bladder) is performed if necessary.

[0485] C. Teratoma Formation

[0486] To produce teratomas, ES cells are engrafted into normal rats or rats with spinal traumatic injury or transient spinal chord ischemia. The rats are first anesthetized with Isoflurane (3%) in an anesthetic induction box. Upon loss of responsiveness and spontaneous movement, the rat is removed from the induction box and the back of the animal is shaved between Th10 vertebra and the sacrum. Isoflurane (1-3%) anesthesia is maintained with a mask, which fits onto the muzzle. The surgical field is wiped with alcohol and prepared with Nolvasan solution. A 2-3 cm skin incision is made on midline between L2-L5 vertebra. Paravertebral muscles are removed and the animal is positioned into spinal apparatus (Stoelting spinal unit). To access the spinal cord a partial laminectomy of the L2-L5 vertebral is performed using a dental drill. HUES-7 or HUES-9 ES cells (Cowan et al. (2004) N Engl J Med 350(13): 1353-6) are then delivered into spinal parenchyma using a glass micropipette (100 mm tip diameter). Each animal receives a total of 20 bilateral injections, each injecting 5000 cells in 0.5 μL into central gray matter of L2-L5 segments. After implantation animals are removed from the spinal apparatus, the wound is washed with 2% H₂O₂, infiltrated with 2% Lidocaine solution and the skin is closed in 2 layers using 3-0 silk.

[0487] D. Treatment with GLV 1 h-68

[0488] Following ES cell transplantation, each rat is administered 5×10⁸ PFU GLV-1h68 in 200 μL PBS at either 2 days, 7 days or 14 days after cell transplantation. A control group of mice receive PBS alone. Animals are perfusion fixed at 1-8 weeks following GLV-1h68- or PBS-treatment, and the GFP expression in the teratomas is verified by fluorescence microscopy. The overall size of the teratomas formed in animals treated with or without GLV-1h68 is assessed and compared.

[0489] Since modifications will be apparent to those of skill in this art, it is intended that this invention be limited only by the scope of the appended claims.

The application's sequence listing, which the Patent Office published only in electronic form, follows.

SEQUENCE LISTING (144 sequences)

SEQ ID NO: 1 - DNA, 203057 bp, Vaccinia virus
  GLV-1h68
ttatgagaccatcaaagagagaaagagaataaaaatatttttgtaaaactttttttatgagaccatcaaagagagaaagagaataaaaatatttttgtaaaacttttttatgagaccatcaaagagagaaagagaataaaaatatttttgtaaaacttttttatgagaccatcaaagagagaaagagaataaaaatatttttgtaaaactttttttatgagaccatcaaagagagaaagagaataaaaatatttttgtaaaactttttttatgagaccatcaaagagagaaagagaataaaaatatttttgtaaaactttttttatgagaccatcaaagagagaaagagaataaaaatatttttgtaaaactttttttatgagaccatcaaagagagaaagagaataaaaatatttttgtaaaactttttttatgagaccatcaaagagagaaagagaataaaaatatttttgtaaaactttttttatgagaccatcaaagagagaaagagaataaaaatatttttgtaaaactttttttatgagaccatcaaagagagaaagagaataaaaatatttttgtaaaactttttttatgagaccatcaaagagagaaagagaataaaaatatttttgtaaaactttttttatgagaccatcaaagagagaaagagaataaaaatatttttgtaaaactttttttatgagaccatcaaagagagaaagagaataaaaatatttttgtaaaactttttttatgagaccatcaaagagagaaagagaataaaaatatttttgtaaaactttttttatgagaccatcagaaagaggtttaatatttttgtgatactctgaaaggaaataggaataggaataggaatagtgtcataatcgtatcacactattgagacagaaaaagaagaagtcgcgagaggtaactttttgtgaatgtagttaagaacatttttgttttgcaaaccggaatatagtgtccggtacacttttttaattcgtggtgtgcctgaatcgttcgattaaccctactcatccaatttcagatgaatagagttatcgattcagacacacgctttgagttttgttgaatcgatgagtgaagtatcatcggttgcaccttcagatgccgatccgtcgacatacttgaatccatccttgacctcaagttcagatgattccttgcacatgtctccgatacgaacgctaaactctagattcttgacgcattttgtatcgacgatcgttgaaccgatgatatcttcgtaactcactttcttatgagagatgttagacccgagtactggatgggtcttgatgtcgctgtctttctcttcttcgctacatctgatgtcgatagacacttcacagtctttgatcatagcaagagcttcttcatgagtgatcgcgggagagtccttaccttgtcctggggacacgctggacaatctagcattcactgtgtttccatcagcggattctgagatggatttaatctgaggacatttggtgaatccaaagttcattctcagacctccaccgatgatggagtaataagtggtaggaggatctacatcctcgactgatgtggaatcatcttctgattccacctcgggatctggatctgactcggactctgtaatttccgttacggattggcaaatcttatcattggtcggtgtttggtcttgctttgtgactttgataataacatcgattcccatatgatgtttgttttcttcttccgtacacgaggaggaggatgaggatgattgctgaagactggcaggcatagcagctgccgccaggcacatgcatgccaggacgatatattgtttcataattgctattgattgagtactgttctttatgattctacttccttaccgtgcaataaattagaatatattttctacttttacgagaaattaattattgtatttattatttatgggtgaaaaacttactataaaaagtgggtgggtttggaattagtgatcagtttatgtatatcgcaactaccgggcatatggctatcgacatcgagaacattacccacatgataagagattgtatcagtttcgtagtcttgagtattggtattactatatagtatatagatgtcgcccactagagttactgtctccgaatgcggcatgatagtatcattctttgctttcgttaactgtttggaggaagaatctttgttattgcatttaatctcgaaattcagagtgcacacctttctcctgtaaagaaacctgaagtcgctaccttattaagaacggagaagtatccatcacgaaatacgggattacagtctttatgattcatagtaatagttagttccgacgttgagatggattcgctgagaccggtagtggtcgtccgagtacacgacgtgtcgttaactggatacaggttaatttccacatcgatatagttaaacgtatttctgggtacgggttcgcatttatctgcggaagagacggtgtgagaatatgttccgagaccacacggagaacagatgacgtctccggatactccgtatcctattccacattttgtttgggaaacacatgccttgcatccggatgatcctttgagaagacaataatatccgggagagcattcacagattctattgtgagtcgtgttacacgatcgcgtcttccgttacaacttagacaagcgggtaaatgattattgcgagatgtgaaggtacccgaaccacacggcgtacatcgtgtgttagtcttgctatcgcataatctggaagcgtatgttcccggacacaaattatggcgtttgtattcgttgtctttacactttccatcggatggtgcatgcggtgctatatctcttccgtttattattatacatgagagaaacaatatatacgagtataatacggacttcatgatttaataatgtagtaatcgttgtcttgttcctgtttcctacttctccaatcatatagatattttctttctatcatggataatatttgtaatggttctttccgtacaacatactgtttagatgatattgcgcataatttccggaggcaaatacgatagtctagattgaccgatggtagactctaatttattgagtgctttgtcgacgagtttacttttacgctccatcgatagatggcactgttctatgagatcgtcgtacatgggaaatgaaatgtgactgtctgaatgtatggctttaagatagctgtgataccgtatacaggtcggtgtcggagattcgaatctctttgaggcgacttatgtcacgatgatggaatctatcttatcgaatgatatatttttcataaatacacttttatagtcctcgtttaaacagaatttactatgtagttccgcgaatgactcgtcccttaataggcagtaggctagtatcttttttacgtagtaatcgtcgtagggagagacatcttgtagaacaacgatttcgttttgttttctcttctgtaactgcttttctggatggccgtattgattatcgagcgtgatactcgctccatattccaataaccgctttgcaaattgtatattattgacatcgaccgcgtaatatagtagagttatcgatcatatctatatcatccatgtacttgcttagtatatcaaatacatctatcagtatggtttcataacagtgatacccgcaattattaaatctcgataatatcagaccgtacatacatagacggccattgttcgatacgtgatttacagccgcgtgtccatattttccacgataaaccttacgacgtttacatcgacgagattattattaacaaagtagtcgtgtagaggatagttgttgtccgttatctaacatgcatcgaacgaccatatcgccgtaatgtaagtagtttatcagtatggcttgtacgatggattcatcctgttgtctaaatctctttagaatgttatcgatgatgtagtggttatattctctggaatcgtacgaagtaatactacgcattacgtcgacaagagtatgacgtctctcaataagaagattaacgatttccatgtctacattatatggggttactctaaatcgcttgtttagataatacgcctctaatatagggctgacgtcgtatactctacacgtgtccacatcctttattaataataatttaacaatctctatatctatggttgagaaagaccagtagtattggatgggtaaagatcctccttcgtctctgccatggatggaaacattgttatcgatcaaacatttaattacatccttggatagagattgagattctctatgagacgatatatagtaatgaagagagttcttacacatatcactgtcgtacatacaggtacgaaatacgtaaccggtgctgtaacattctgatttaagaagccatagcaatacttctggtctcggattaggcgtcgttacgtatatatccaccaatccgagaccattgattgcataattcgtattcttggacggacgtatccgtttatccacaattaggtattttagcagacgtaagtcgatattatccgaatacagatcgaaatcatttatattcgacttgagttcgttagaggaatttgaatagctggatatcagtagatgcacaatctgagattttacgtatctatgcttactgtatactcctagcggagttaatccttcgttgtttctacaaagtctctcgactccgcgagagaacaatcttaatgtctgtatcgcatttattggagacgtaacaatgtagcgcattgtttcctcgtctatctatatgttttgataagttgtgacacgtttcaatttctagttttatttttttgtacgtcacatcttcatccagtagacgacatagaatagtgcactctctaccacaataatccatagctattctggtgctaattattcctatttcacgaaggcaatcattcctcataagatgataaaaagtgtagtggagatttagtatttagcagtgcggatatgatccaagagggtgagatagtcgttctcgttcagaatctttcgcagcataagtagtatgtcgatatacttatcgttgaagactctttataaaagtctatttgtttatatttattgcggatagcagtatttccctataaaaagtatacgtcctgtggtgtctttaatcatgtacatgaatggatggtttatgtagaccttcgtacgatataccatcgaaaagttaatcgtaaatactcctgtaacggccgatgcttctgtatactcctcattaacatctataaacgtcgtatgtagaaatttttctacagtgatagtttcattacacatcttgctaaaatctgcataatatccgaatatattagtaagtcctaaattttctaaaatcggtaccagattatacggttctgtcatttccactttaaactttggcatatacaagtctatacttttagtagataacataccacaccattttttaaatttttcatctgttatatttttttctatgttatatataccttctatgtcgtccggtagtataattaccatactagagtttccctcgtatggaatatcgataatagagaatcctccgaataattcattaatatgtacatattgcaagttattctcggtacccaccatcatatcaacgctggtaactatattcttagaaatataaaacttgtctgtatatgtaagatgtttagaaaatggatatttccacattgctttaaaatggacggcgctaacaactgtcatacgagtattaatggatagcggactagtcaataaggaattaattttaccatttgtcattgtcttaacccattcgttgattagttcctttgtttggttagcattattaaagtttacagtttgaaaatcgtcttttattttttgtaggaaggaggcgtggaactcgatactatcgctaccgtatattttatttgcggtagctagtgtcgcacaatacggaatatctacctccatgtcatcattattgtcatcgggtgtattctcattcatattctctatatattttgatagttgttcagctgtagaaccagctgctccatgatttagaatagataaagtagataaaatggaaactggagaaatcaaaacattttcatcagggtgttttaagattagttctttaaagatatccatggtatagacctaacgataacgatatatatcataaataaataatgttaaatttcaatttatgtttgtaccccgtattcatacttaacaaattggtattgcgtacacaatcaatcatattacataccattaataatgcaagcataaaaaattgttagtagatgtttctaaatataggttccgtaagcaaagaatataagaatgaagcggtaatgataaaatcaatcgttatctaaaatgatcatactcatttattttattctattatattaacacatacatttttaacagcaacacattcaatattgtattgttatttttatattatttacacaattaacaatatattattagtttatattactgaattaataatataaaattcccaatcttgtcataaacacacactgagaaacagcataaacacagaatccatcaaaaatgttgataaattatctgatgttgttgttcgctgctatgataatcagatcattcgccgatagtggtaacgctatcgaaacgacattgccagaaattacaaacgctacaacagatattccagctatcagattatgcggtccagagggagatggatattgtttacacggtgactgtatccacgctagagatattgacggtatgtattgtagatgctctcatggttatacaggcattagatgtcagcatgtagtattagtagactatcaacgttcagaaaacccaaacactacaacgtcatatatcccatctcccggtattatgcttgtattagtaggcattattatgtgttgtctattatctgtttataggttcactcgacgaactaaactacctatacaagatatggttgtgccataatttttataaatttttttatgagtatttttacaaaaatgtataaagtgtatgtcttatgtatatttataaaaatgctaagtatgcgatgtatctatgttatttgtatttatctaaacaatacctctacctctagatattatacaaaaattttttatttcggcatattaaagtaaaatctagttaccttgaaaatgaatacagtgggtggttccgtatcaccagtaagaacataatagtcaaatacagtatccgattgagattttgcatacaatactagtctagaaagaaatttgtaatcatcttctgtgacgggagtccatatatctgtatcatcgtctagtttatcagtgtcccatgctatattcctgttatcatcattagttaatgaaaataactctcgtgcttcagaaaagtcaaatattgtatccatacatacatctccaaaactatcgcttatacgtttatctttaacgatacctatacctagatggttatttactaacagacattttccagatctattgactataactcctatagtttccacatcaaccaagtaatgatcatctattgttatataacaataacataactcttttccatttttatcagtatgtatatctatatcaacgtcgtcgttgtagtgaatagtagtcattgatctattatatgaaacggatatgtctagaacggcaattgttttacgtccagttaacactttcgttgatttaaagtctagagtctttgcaaacataatatccttatccgactttatatttcctgtagggtggtataattttattttgcctccacatatcggtgtttccaaatatattactagacaatattccatatagttattagttaagggtacccaattagaacacgtacgcttattatcatcatttggatcgtatttcataaaagttattgtgttatcgatgtcaacacattctacattttttaatcgtctatatagtatttttctgatattttctataatatcagaattgtcttccatcggaagttgtatactatcggaatcagttacatgtttaaataattctctgatgtcattccttatacaatcaaattcattattaaacagtttaatagtctgtagacctttatcgtcgtaaatatccattgtcttattagttacgcttatttttatgtgtttttacgttgctttattatattttataagaatgattgtttgacgaatcacgagaactattaagacacattattaggtatatattataaaaaagtttttgattacgatgttataagaggaaagaggacacattaacatcatacatcaattaactacattcttataacatcgtaatcaaaagaattgcaattttgatgtataacaactgtcaatgggttatggaattgtatattacatattatacggtatgttggtaacgacaaataccggtcggtaattgtctgccggtgtaatagaattatatatatctatctattacaccggccttgtatacataataataagttgtggtagtatgatctccatatttataatttaggactttgtattcagtatttttggaatcataaaaaataaaaaaaagttttactaatttaaaatttaaaaagtatttacatttttttcactgtttagtcgcggatatggaattcgatcctgccaaaatcaatacatcatctatagatcatgtaacaatattacaatacatagatgaaccaaatgatataagactaacagtatgcattatccgaaatattatatcaatatcacaaaaataaatacacatttggctaatcaatttcgggcttggaaaaaacgtatcgccggaagggactatatgactaacttatctagagatacaggaatacaacaatcaaaacttactgaaactatacgtaactgtcaaaaaaatagaaacatatatggtctatatatacactacaatttagttattaattggataaccgatgtgattatcaatcaatattaagagggttggtaaattggtacatagctaataatacctatactccaaatacacccaataatacaacaaccatttctgagttggatatcatcaaaatactaaataaatacgaggacgtgtatagagtaagtaaagaaaaagaatgtggaatttgctatgaagttgtttactcaaaacgatagatactttggtttattggattcgtgtactcatatattttgcataacatgcatcaatatatggcatagaacacgaagagaaaccggtgcgtcggataattgtcctatatgccgtacccgttttagaaacataacaatgagcaagttctataagctagttaactaataaataaaaagtttaatttgttgacgacgtatgtcgttattttttctcgtataaaagattaatttgattctaatataatctttagtattggataaatatcaattcaaattaattccattagattatatcataaataaaaatagtagcacacaactacttcagcaaacattctttttataaatgccatctagcgtagcgaggacacaagtgaacctataattatcaaatttattagtatcagtcacatgaaggactttacgtagagtgacgattccactatctgtggtacgaacggtttcatcttctttgatgccatcacccagatgttctataaacttggtatcctcgtccgatttcatatcctttgccaaccaatacatatagctaaactcaggcatatgttccacacatcctgaacaatgaaattctccagaagatgttacaatgtctagatttggacatttggtttcaaccgcgttaacatatgagtgaacacacccatacatgaaagcgatgagaaataggattctcatcttgccaaaatatcactagaaaaaatttatttatcagttttaaaggtataaaaaatacttattgttgctcgaatattttgtatttgatggtatacggaagattagaaatgtaggtattatcatcaactgattctatggttttatgtattctatcatgtttcactattgcgttggaaataatatcatatgcttccacatatattttattttgttttaactcataatactcacgtaattctggattattggcatatctatgaataattttagctccatgatcagtaaatattaatgagaacatagtattaccacctaccattatttttttcatctcattcaattcttaattgcaaagatctatataatcattatagcgttgacttatggactctggaatcttagacgatgtacagtcatctataatcatggcatatttaatacattgttttatagcatagtcgttatctacgatgttagatatttctctcaatgaatcaatcacacaatctaatgtaggtttatgacataatagcattttcagcagttcaatgtttttagattcgttgatggcaatggctatacatgtatatccgttatttgatctaatgttgacatctgaaccggattctagcagtaaagatactagagattgtttattatatctaacagccttgtgaagaagtgtttctcctcgtttgtcaatcatgttaatgtctttaagataaggtaggcaaatgtttatagtactaagaattgggcaagcataagacatgtcacaaagacccttttttgtatgtataagtgtaaaaattataacatccatagttggatttacataggtgtccaatcgggatctctccatcatcgagataattgatggcatctcccttccttttttagtagatatttcatcgtgtaagaatcaatattaatatttctaaagtatccgtgtatagcctctttatttaccacagctccatattccactagagggatatcgccgaatgtcatatactcaattagtatatgttggaggacatccgagttcattgttttcaatatcaaagagatggtttccttatcatttctccatagtggtacaatactacacattattccgtgcggctttccattttccaaaaacaatttgaccaaatctaaatctacatctttattgtatctataatcactatttagataatcagccataattcctcgagtgcaacatgttagatcgtctatatatgaataagcagtgttatctattcctttcattaacaatttaacgatgtctatatctatatgagatgacttaatataatattgaagagctgtacaatagtttttatctataaaagacggcttgattccgtgattaattagacatttaacaacttccggacgcacatatgctctcgtatccgactctgaatacagatgagagatgatatacagatgcaatacggtaccgcaatttcgtagttgataatcatcatacgcgtatcagtactcgtcctcataaagaacactgcagccattttctatgaacaaatcaataattttagaaacaggatcattgtcattacataattttctataactgaacgatggttttcacatttaacactcaagtcaaatccatgttctaccaacacctttatcaagtcaacgtctacatttttggatttcatatagctgaatatattaaagttatttatgttgctaaatccagtggcttctagtagagccatcgctatatccttattaactttaacatgtctactatttgtgtattcttctaatggggtaagctgtctccaatttttgcgtaatggattagtgccactgtctagtagtagtttgacgacctcgacattattacaatgctcattaaaaaggtatgcgtgtaaagcattattcttgaattggttcctggtatcattaggatctctgtctttcaacatctgtttaagttcatcaagagccacctcctcattttccaaatagtcaaacattttgactgaatgagctactgtgaactctatacacccacacaactaatgtcattaaatatcatgtcaaaaacttgtacaattattaataaaaataatttagtgtttaaattttaccagttccagattttacacctccgttaatacctccattaaccccactggacgatcctcctccccacattccaccgccaccagatgtataagttttagatcctttattactaccatcatgtccatggataaagacactccacatgccgccactaccccctttagaagacatattaataagacttaaggacaagtttaacaataaaattaatcacgagtaccctactaccaacctacactattatatgattatagtttctatttttacagtaccttgactaaagtttctagtcacaagagcaatactaccaacctacactattatatgattatagtttctatttttataggaacgcgtacgagaaaatcaaatgtctaatttctaacggtagtgttgataaacgattgttatccgcggatacctcctctatcatgtcgtctattttcttactttgttctattaacttattagcattatatattatttgattataaaacttatattgcttattagcccaatctgtaaatatcggattattaacatatcgtttctttgtaggtttatttaacatgtacatcactgtaagcatgtccttaccatttattttaatttgacgcatatccgcaatttctttttcgcagtcggttataaattctatatatgatggatacatgctacatgtgtacttataatcgactaatatgaagtacttgatacatattttcagtaacgatttattattaccacctatgaataagtacctgtgatcgtctaggtaatcaactgttttcttaatacattcgatggttggtaatttactcagaataatttccaatatcttaatatataattctgctatttctgggatatatttatctgccagtataacacaaatagtaatacatgtaaacccatattttgttattatattaatgtctgcgccattatctattaaccattctactaggctgacactatgcgactcaatacaatgataaagtatactacatccatgtttatctattttgtttatatcatcaatatacggcttacaaagttttagtatcgataacacatccaactcacgcatagagaaggtagggaataatggcataatatttattaggttatcatcattgtcattatctacaactaagtttccattttttaaaatatactcgacaactttaggatctctattgccaaatttttgaaaatatttatttatatgcttaaatctatataatgtagctccttcatcaatcatacatttaataacattgatgtatactgtatgataagatacatattctaacaatagatcttgtatagaatctgtatatcttttaagaattgtggatattaggatattattacataaactattacacaattctaaaatataaaacgtatcacggtcgaataatagttgatcaactatataattatcgattttgtgatttttcttcctaaactgtttacgtaaatagttagatagaatattcattagttcatgaccactatagttactatcgaataacgcgtcaaatatttcccgtttaatatcgcatttgtcaagataataatagagtgtggtatgttcacgataagtataataacgcatctctttttcgtgtgaaattaaatagtttattacgtccaaagatgtagcataaccatcttgtgacctagtaataatataataatagagaactgttttacccattctatcatcataatcagtggtgtagtcgtaatcgtaatcgtctaattcatcatcccaattataatattcaccagcacgtctaatctgttctattttgatcttgtatccatactgtatgttgctacatgtaggtattcctttatccaataatagtttaaacacatctacattgggatttgatgttgtagcgtatttttctacaatattaataccatttttgatactatttatttctatacctttcgaaattagtaatttcaataagtctatattgatgttatcagaacatagatattcgaatatatcaaaatcattgatatttttatagtcgactgacgacaataacaaaatcacaacatcgtttttgatattattatttttcttggtaacgtatgcctttaatggagtttcaccatcatactcatataatggatttgcaccactttctatcaatgattgtgcactgctggcatcgatgttaaatgttttacaactatcatagagtatcttatcgttaaccatgattggttgttgatgctatcgcattttttggtttctttcatttcagttatgtatggatttagcacgtttgggaagcatgagctcatatgatttcagtactgtagtgtcagtactattagtttcaataagatcaatctctagatctatagaatcaaaacacgataggtcagaagataatgaatatctgtaggcttcttgttgtactgtaacttctggttttgttagatggttgcatcgtgctttaacgtcaatggtacaaattttatcctcgctttgtgtatcatattcgtccctactataaaattgtatattcagattatcatgcgatgtgtatacgctaacggtatcaataaacggagcacaccatttagtcataaccgtaatccaaaaatttttaaagtatatcttaacgaaagaagttgtgtcattgtctacggtgtatggtactagatcctcataagtgtatatatctagagtaatgtttaatttattaaatggttgataatatggatcctcgtgacaatttccgaagatggaaataagacataaacacgcaataaatctaattgcggacatggttactccttaaaaaaatacgaataatcaccttggctatttagtaagtgtcatttaacactatactcatattaatccatggactcataatctctatacgggattaacggatgttctatatacggggatgagtagttctcttctttaactttatactttttactaatcatatttagactgatgtatgggtaatagtgtttgaagagctcgttctcatcatcagaataaatcaatatctctgtttttttgttatacagatgtattacagcctcatatattacgtaatagaacgtgtcatctaccttattaactttcaccgcatagttgtttgcaaatacggttaatcctttgacctcgtcgatttccgaccaatctgggcgtataatgaatctaaactttaattgcttgtaatcattcgaaataatttttagtttgcatccgtagttatcccctttatgtaactgtaaatttctcaacgcgatatctccattaataatgatgtcgaattcgtgctgtatacccatactgaatggatgaacgaataccgacggcgttaatagtaatttactttttcatctttacatattgggtactagttttactatcataagtttataaattccacaagctactatggaataagccaaccatcttagtataccacacatgtcttaaagtttattaattaattacatgttgttttatatatatcgctacgaatttaaagagaaattagtttaggaagaaaaattatctatctacatcatcacgtctctgtattctacgatagagtgctactttaagatgcgacagatccgtgtcatcaaatatatactccattaaaatgattattccggcagcgaacttgatattggatatatcacaacctttgttaatatctacgacaatagacagcagtcccatggttccataaacagtgagtttatctttctttgaagagatattttgtagagatcttataaaactgtcgaatgacatcgcatttatatctttagctaaatcgtatatgttaccatcgtaatatctaaccgcgtctatcttaaacgtttccatcgctttaaagacgtttccgatagatggtctcatttcatcagtcatactgagccaacaaatataatcgtgtataacatctttgatagaatcagactctaaagaaaacgaatcggctttattatacgcattcatgataaacttaatgaaaaatgtttttcgttgtttaagttggatgaatagtatgtcttaataattgttattatttcattaattaatatttagtaacgagtacactctataaaaacgagaatgacataactaatcataactagttatcaaagtgtctaggacgcgtaattttcatatggtatagatcctgtaagcattgtctgtattctggagctattttctctatcgcattagtgagttcagaatatgttataaatttaaatcgaataacgaacataactttagtaaagtcgtctatattaactcttttattttctagccatcgtaataccatgtttaagatagtatattctctagttactacgatctcatcgttgtctagaatatcacatactgaatctacatccaattttagaaattggtctgtgttacatatctcttctatattattgttgatgtattgtcgtagaaaactattacgtagaccattttctttataaaacgaatatatagtactccaattatctttaccgatatatttgcacacataatccattctctcaatcactacatctttaagattttcgttgttaagatatttggctaaactatataattctattagatcatcaacagaatcagtatatatttttctagatccaaagacgaactctttggcgtcctctataatattcccagaaaagatattttcgtgttttagtttatcgagatctgatctgttcatatacgccatgattgtacggtacgttatgataaccgcataaaataaaaatccattttcatttttaaccaatactattcataattgagattgatgtaatactttgttactttgaacgtaaagacagtacacggatccgtatctccaacaagcacgtagtaatcaaatttggtgttgttaaacttcgcaatattcatcaatttagatagaaacttatactcatcatctgttttaggaatccatgtattattaccactttccaacttatcattatcccaggctatgtttcgtccatcatcgttgcgcagagtgaataattcttttgtattcggtagttcaaatatatgatccatgcatagatcggcaaagctattgtagatgtgatttttcctaaatctaatataaaactcgtttactagcaaacactttcctgatttatcgaccaagacacatatggtttctaaatctatcaagtggtggggatccatagttatgacgcagtaacatatattattacattcttgactgtcgctaatatctaaatatttattgttatcgtattggattctgcatatagatggcttgtatgtcaaagatatagaacacataaccaatttatagtcgcgctttacattctcgaatctaaagttaagagatttagaaaacattatatcctcggatgatgttatcactgtttctggagtaggatatattaaagtctttacagatttcgtccgattcaaataaatcactaaataatatcccacattatcatctgttagagtagtatcattaaatctattatattttatgaaagatatatcactgctcacctctatatttcgtacatttttaaactgtttgtataatatctctctgatacaatcagatatatctattgtgtcggtagacgataccgttacatttgaattaatggtgttccattttacaacttttaacaagttgaccaattcatttctaatagtatcaaactctccatgattaaatattttaatagtatccattttatatcactacggacacaaagtagctgacataaaccattgtataatttttatgttttatgtttattagcgtacacattttggaagttccggcttccatgtatttcctggagagcaagtagatgatgaggaaccagatagtttatatccgtacttgcacttaaagtctacattgtcgttgtatgagtatgatcttttaaacccgctagacaagtatccgtttgatattgtaggatgtggacatttaacaatctgacacgtgggtggatcggaccattctcctcctgaacacaggacactagagttaccaatcaacgaatatccactattgcaactataagttacaacgctcccatcggtataaaaatcctcgtatccgttatgtcttccgttggatatagatggaggggattggcatttaacagattcacaaataggtgcctcgggattccataccatagatccagtagatcctaattcacaatacgatttagattcaccgatcaactgatatccgctattacaagagtacgttatactagagccaaagtctactccaccaatatcaagttggccattatcgatatctcgaggcgatgggcatctccgtttaatacattgattaaagagtgtccatccagtacctgtacatttagcatatataggtcccattttttgctttctgtatccaggtagacatagatattctatagtgtctcctatgttgtaattagcattagcatcagtctccacactattcttaaatttcatattaatgggtcgtgacggaatagtacagcatgatagaacgcatcctattcccaacaatgtcaggaacgtcacgctctccaccttcatatttatttatccgtaaaaatgttatcctggacatcgtacaaataataaaaagcccatatatgttcgctattgtagaaattgtttttcacagttgctcaaaaacgatggcagtgacttatgagttacgttacactttggagtctcatctttagtaaacatatcataatattcgatattacgagttgacatatcgaacaaattccaagtatttgattttggataatattcgtattttgcatctgctataattaagatataatcaccgcaagaacacacgaacatctttcctacatggttaaagtacatgtacaattctatccatttgtcttccttaactatatatttgtatagataattacgagtctcgtgagtaattccagtaattacatagatgtcgccgtcgtactctacagcataaactatactatgatgtctaggcatgggagacttttttatccaacgatttttagtgaaacattccacatcgtttaatactacatatttctcatacgtggtataaactccacccattacatatatatcatcgtttacgaataccgacgcgcctgaatatctaggagtaattaagtttggaagtcttatccatttcgaagtgccgtgtttcaaatattctgccacacccgttgaaatagaaaattctaatcctcctattacatataactttccatcgttaacacaagtactaacttctgattttaacgacgacatattagtaaccgttttccattttttcgttttaagatctacccgcgatacggaataaacatgtctattgttaatcatgccgccaataatgtatagacaattatgtaaaacatttgcattatagaattgtctatctgtattaccgactatcgtccaatattctgttctaggagagtaatgggttattgtggatatataatcagagtttttaatgactactatattatgttttataccatttcgtgtcactggctttgtagatttggatatagttaatcccaacaatgatatagcattgcgcatagtattagtcataaacttgggatgtaaaatgttgatgatatctacatcgtttggatttttatgtatccactttaataatatcatagctgtaacatcctcatgatttacgttaacgtcttcgtgggataagatagttgtcagttcatcctttgataattttccaaattctggatcggatgtcaccgcagtaatattgttgattatttctgacatcgacgcattatatagttttttaattccatatcttttagaaaagttaaacatccttatacaatttgtgaaattaatattatgaatcatagtttttacacatagatctactacaggcggaacatcaattattatggcagcaactagtatcatttctacattgtttatggtgatgtttatcttcttccagcgcatatagtctaatagcgattcaaacgcgtgatagtttataccattcaatataatcgcttcatcctttagatggtgatcctgaatgcgtttaaaaaaattatacggagacgccgtaataatttccttattcacttgtataatttccccattgatagaaaatattacgctttccattcttaaagtactataagtaattatagtataatgtaaacgtttatatattcaatatttttataaaaatcattttgacattaattcctttttaaatttccgtctatcatctatagaaacgtattctatgaatttataaaatgcttttacgtgtcctatcgtaggcgatagaaccgctaaaaagcctatcgaatttctacaaaagaatctgttatatggtatagggagagtataaaacattaaatgtccgtacttattaaagtattcagtagccaatcctaactctttcgaatacttattaatggctcttgttctgtacgaatctatttttttgaacaacggacctagtggtatatcttgttctatgtatctaaaataatgtctgactagatccgttagtttaatatccgcagtcatcttgtctagaatggcaaatctaactgcgggtttaggctttagtttagtttctatatctacatctatgtctttatctaacaccaaaaatataatagctaatattttattacaatcatccggatattcttctacgatctcactaactaatgtttctttggttatactagtatagtcactatcggacaaataaagaaaatcagatgatcgatgaataatacatttaaattcatcatctgtaagatttttgagatgtctcattagaatattattagggttagtactcattatcattcggcagctattacttattttattatttttcaccatatagatcaatcattagatcatcaaaatatgtttcaatcatcctaaagagtatggtgaatgactcttcccatctaatttctgaacgttcaccaatgtctctagccactttggcactaatagcgatcattcgcttagcgtcttctatattattaactggttgatttaatctatctagcaatggaccgtcggacagcgtcattctcatgttcttaatcaatgtacatacatcgccgtcatctaccaattcatccaacaacataagctttttaaaatcatcattataataggtttgatcgttgtcatttctccaaagaatatatctaataagtagagtcctcatgcttagttaacaactattttttatgttaaatcaattagtacaccgctatgtttaatacttattcatattttagtttttaggattgagaatcaatacaaaaattaatgcatcattaattttagaaatacttagtttccacgtagtcaatgaaacatttgaactcatcgtacaggacgttctcgtacaggacgtaactataaaccggtttatatttgttcaagatagatacaaatccgataactttttttacgaattctacgggatccactttaaaagtgtcataccgggttctttttatttttttaaacagatcaatggtgtgatgttgattaggtcttttacgaatttgatatagaatagcgtttacatattctccataatggtcaatcgccatttgttcgtatgtcataaattctttaattatatgacactgtgtattatttagttcatccttgttcattgttaggaatctatccaaaatggcaattatactagaactataggtgcgttgtatacacatattgatgtgtctgtttatacaatccatgatatttggatccatgctactaccttcgggtaaaattgtagcatcatataccatttctagtactttaggttcattattatccattgcagaggacgtcatgatcgaatcataaaaaaatatattatttttatgttattttgttaaaaataatcatcgaatacttcgtaagatactccttcatgaacataatcagttacaaaacgtttatatgaagtaaagtatctacgatttttacaaaagtccggatgcataagtacaaagtacgcgataaacggaataataatagatttatctagtctatctttttctatagctttcatagttagatacatggtctcagaagtaggattatgtaacatcagcttcgataaaatgactgggttatttagtcttacacattcgctcatacatgtatgaccgttaactacagagtctacactaaaatgattgaacaatagatagtctaccattgtttcgtattcagatagtacagcgtagtacatggcatcttcacaaattatatcattgtctaatagatatttgacgcatcttatggatcccacttcaacagccatcttaaaatcatattgctttcctttatcattaataatttctagaacatcatctctatcataaaagatacaaatattaactgtttgatccgtaataacattgctagtcaatagcaatttgttaataagatgcgctgggctcaatgtcttaataagaagtgtaagaggactatctccgaatttgttttgtttattaacatccgttgatggaagtaaaagatctataatgtctacattcttgactgttttagagcatacaatatggagaggtgtatttccatcatgatctggttttgagggactaattcctagtttcatcatccatgagattgtagaagcttttggattgtctgacataagatgtctatgaatatgatttttgccaaatttatccactatcctggcttcgaatccgatggacattatttttttaaacactctttctgaaggatctgtacacgccaacaacggaccacatccttcttcatcaaccgagttgttaatcttggctccatactgtaccaataaatttattctctctatgacttcatcatctgttcccgagagataatatagaggtgttttatgctgtttatcacacgcgtttggatctgcgccgtgcgtcagcagcatcgcgactattctattattattaattttagaagctatatgcaatggataatttccatcatcatccgtctcatttggagagtatcctctatgaagaagttcttcgacaaatcgttcatctagtcctttaattccacaatacgcatgtagaatgtgataattatttccagaaggttcgatagcttgtagcatattcctaaatacatctaaatttttactattatatttggcataaagagatagataatactcggccgacataatgttgtccattgtagtataaaaattaatatttctatttctatttctgtatatttgcaacaatttactctctataacaaatatcataacttagtttttttatgtcaagaaggcactggtttagttcatctataaatgtcacgccataactaccacgcatgccatactcagaattatgataaagatatttatccttggggtgtaggtaatggggattaatctttgttggatcagtctctaagttaacacatgtcacacatgatccatttatagttatatcacacgatgatgatttatgaattgattccggaagatcgctatcgtattttgtggttccacaattcatttccatacatgttattgtcacactaatattatgatgaactttatctagccgctgagtggtaaacaacagaacagatagtttattatctttaccaacaccctcagccgctgccacaaatctctgatccgtatccatgatggtcatgtttatttctagtccgtatccagtcaacactatgttagcatttctgtcgatatagctttcactcatatgacactcaccaataatagtagaattaatgtcgtaatttacaccaatagtgagttcggcggcaaagtaccaataccggtaatcttgtcgaggaggacatatagtattcttgtattctaccgaatacccgagagatgcgatacaaaagagcaagactaatttgtaaaccatcttactcaaaatatgtaacaatagtacgatgcaatgagtaagacaataggaaatctatcttatatacacataattattctatcaattttaccaattagttagtgtaatgttaacaaaaatgtgggagaatctaattagtttttctttacacaattgacgtacatgagtctgagttccttgtttttgctaattatttcatccaatttattattcttgacgatatcgagatcttttgtataggagtcaaacttgtattcaacatgcttttctataatcattttagctatttcggcatcatccaatagtacattttccagattagcagaatagatattaatgtcgtatttgaacagagcctgtaacatctcaatgtctttattatctatagccaatttaatgtccggaatgaagagaagggaattattggtgtttgtcgacgtcatatagtcgagcaagagaatcatcatatccacgtgtccattttttatagtgatgtgaatacaactaaggagaatagccagatcaaaagtagatggtatctctgaaagaaagtaggaaacaatacttacatcattaagcatgacggcatgataaaatgaagttttccatccagttttcccatagaacatcagtctccaatttttcttaacaaacagttttaccgtttgcatgttaccactatcaaccgcataatacaatgcggtgtttcccttgtcatcaaattgtgaatcatccagtccactgaatagcaaaatctttactattttggtatcttccaatgtggctgcctgatgtaatggaaattcattctctagaagatttttcaatgctccagcgttcaacaacgtacatactagacgcacgttattatcagctattgcataatacaaggcactatgtccatggacatccgccttaaatgtatctttactagagagaaagcttttcagctgcttagacttccaagtattaattcgtgacagatccatgtctgaaacgagacgctaattagtgtatattttttcattttttataattttgtcatattgcaccagaattaataatatctttaatagatctgattagtagatacatggctatcgcaaaacaacatatacacatttaataaaaataatatttattaagaaaattcagatttcacgtacccatcaatataaataaaataatgattccttacaccgtacccatattaaggagattccaccttacccataaacaatataaatccagtaatatcatgtctgatgatgaacacaaatggtgtattaaattccagtttttcaggagatgatctcgccgtagctaccataatagtagatgcctctgctacagttccttgttcgtcgacatctatctttgcattctgaaacattttataaatatataatgggtccctagtcatatgtttaaacgacgcattatctggattaaacatactaggagccatcatttcggctatcgacttaatatccctcttattttcgatagaaaatttagggagtttaagattgtacactttattccctaattgagacgaccaatagtctaattttgcagccgtgatagaatctgtgaaatgggtcatattatcacctattgccaggtacatactaatattagcatccttatacggaaggcgtaccatgtcatattctttgtcatcgattgtgattgtatttccttgcaatttagtaactacgttcatcatgggaaccgttttcgtaccgtacttattagtaaaactagcattgcgtgttttagtgatatcaaacggatattgccatatacctttaaaatatatagtattaatgattgcccatagagtattattgtcgagcatattagaatctactacattagacataccggatctacgttctactatagaattaattttattaaccgcatctcgtctaaagtttaatctatataggccgaatctatgatattgttgataatacgacggtttaatgcacacagtattatctacgaaactttgataagttagatcagtgtacgtatatttagatgttttcagcttagctaatcctgatattaattctgtaaatgctggacccagatctctttttctcaaatccatagtcttcaataattctattctagtattacctgatgcaggcaatagcgacataaacatagaaaacgaataaccaaacggtgagaagacaatattatcatcttgaatatttttatacgctactataccggcattggtaaatccttgtagacgataggcggacgctgaacacgctaacgatagtatcaataacgcaatcatgattttatggtattaataattaaccttatttttatgttcggtataaaaaaattattgatgtctacacatccttttgtaattgacatctatatatccttttgtataatcaactctaatcactttaacttttacagttttccctaccagtttatccctatattcaacatatctatccatatgcatcttaacactctctgccaagatagcttcagagtgaggatagtcaaaaagataaatatatagagcataatcattctcgtatactctgccctttattacatcacccgcattgggcaacgaataacaaaatgcaagcatcttgttaacgggctcgtaaattgggataaaaattatgtttttattgtcttatatctattttattcaagagaatattcaggaatttctttttccggttgtatctcgtcgcagtatatatcatttgtacattgtttcatattttttaatagtttacaccttttagtaggactagtatcgtacaattcatagctgtattttgaattccaatcacgcataaaaatatcttccaattgttgacgaagacctaatccatcatccggtgtaatattaatagatgctccacatgtatccgtaaagtaatttcctgtccaatttgaggtacctatataggccgttttatcggttaccatatatttggcatggtttaccctagaatacggaatgggaggatcagcatctggtacaataaatagctttacttctatatttatgtttttagattttagcatagcgatagatcttaaaaagtttctcatgataaacgaagatcgttgccagcaactaatcaatagcttaacggatacttgtctgtctatagcggatcttcttaattcatcttctatataaggccaaaacaaaattttacccgccttcgaataaataatagggataaagttcataacagatacataaacgaatttactcgcatttctaatacatgacaataaagcggttaaatcattggttctttccatagtacatagttgttgcggtgcagaagcaataaatacagagtgtggaacgccgcttacgttaatactaagaggatgatctgtattataatacgacggataaaagtttttccaattatatggtagattgttaactccaagataccagtatacctcaaaaatttgagtgagatccgctgccaagttcctattattgaagatcgcaatacccaattccttgacctgagttagtgatctccaatccatgttagcgcttcctaaataaatatgtgtattatcagatatccaaaattttgtatgaagaactcctcctaggatatttgtaatatctatgtatcgtacttcaactccggccatttgtagtctttcaacatcctttaatggtttgttagatttattaacggctactctaactcgtactcctcttttgggtaattgtacaatctcgtttaatattatcgtgccgaaattcgtacccacttcatccgataaactccaataaaaagatgatatatctagtgtttttgtggtattggatagaatttccctccacatgttaaatgtagacaaatatactttatcaaattgcatacctataggaatagtttctgtaatcactgcgattgtattatccggattcattttatttgttaaaagaataatcctatatcacttcactctattaaaaatccaagtttctatttctttcatgactgattttttaacttcatccgtttccttatgaagatgatgtttggcaccttcataaatttttatttctctattacaatttgcatgttgcatgaaataatatgcacctaaaacatcgctaatcttattgtttgttccctggagtatgagagtcggggggtgttaatcttggaaattatttttctaaccttgttggtagccttcaagacctgactagcaaatccagccttaattttttcatgattgactaatgggtcgtattggtatttataaactttatccatatctctagatactgattctggacatagctttccgactggcgcatttggtgtgatggttcccataagtttggcagctagcagattcagtcttgaaacagcatctgcattaactagaggagacattagaatcattgctgtaaacaagtttggattatcgtaagaggctagctcccatggaatgacccaataagtagatttaatagttaccacgtgctgtaccaaagtcatcaatcatcattttttcaccattacttcttccatgtccaatatgatcatgtgagaatactaaaattcctaacgatgatatgttttcagctagttcgtcataacgtccagaatgtttaccagctccatgacttatgaatactaatgccttaggatatgtaataggtttccaatatttacaatatatgtaatcattgtccagattgaacatacagtttgcactcatgattcacgttatataactatcaatattaacagttcgtttgatgatcatattatttttatgttttattgataattgtaaaaacatacaattaaatcaatatagaggaaggagacggctactgtcttttgtaagatagtcatggcgactaaattagattatgaggatgctgttttttactttgtggatgatgataaaatatgtagtcgcgactccatcatcgatctaatagatgaatatattacgtggagaaatcatgttatagtgtttaacaaagatattaccagttgtggaagactgtacaaggaattgatgaagttcgatgatgtcgctatacggtactatggtattgataaaattaatgagattgtcgaagctatgagcgaaggagaccactacatcaattttacaaaagtccatgatcaggaaagtttattcgctaccataggaatatgtgctaaaatcactgaacattggggatacaaaaagatttcagaatctagattccaatcattgggaaacattacagatttgatgaccgacgataatataaacatcttgatactttttctagaaaaaaaattgaattgatgatataggggtcttcataacgcataattattacgttagcattctatatccgtgttaaaaaaaattatcctatcatgtatttgagagttttatatgtagcaaacatgatagctgtgatgccaataagctttagatattcacgcgtgctagtgttagggatggtattatctggtggtgaaatgtccgttatataatctacaaaacaatcatcgcatatagtatgcgatagtagagtaaacatttttatagtttttactggattcatacatcgtctacccaattcggttataaatgaaattgtcgccaatcttacacccaaccccttgttatccattagcatagtattaacttcgttatttatgtcataaactgtaaatgattttgtagatgccatatcatacatgatattcatgtccctattataatcattactaactttatcacaatatatgttgataatatctatatatgatctagtctttgtgggcaactgtctatacaagtcgtctaaacgttgtttactcatatagtatcgaacagccatcattacatggtcccgttccgttgatagataatcgagtatgttagtggacttgtcaaatctatataccatattttctggaagtggatatacatagtcgtgatcaacattattgctagcctcatcttctatatcctgtactataccattatctatatcatctacataatctatgatattattacacataaacatcgacaacatactattgtttattatctaagtcctgttgatccaaacccttgatctcctctatttgtactatctagagattgtacttcttccagttctggataatatatacgttgatagattagctgagctattctatctccagtatttacattaaacgtacattttccattattaataagaatgactcctatgtttcccctataatcttcgtctattacaccacctcctatatcaatgccttttagtgacagaccagacctaggagctattctaccatagcagaacttaggcatggacatactaatatctgtcttaattaactgtctttctcctggagggatagtataatcgtaagcgctatacaaatcatatccggcagcacccggcgattgcctagtaggagatttagctctgttagtttccttaacaaatctaactggtgagttaatattcatgttgaacataaaactaatattttatttcaaaattatttaccatcccatatattccatgaataagtgtgatgattgtacacttctatagtatctatatacgatccacgataaaatcctcctatcaatagcagtttattatccactatgatcaattctggattatccctcggataaataggatcatctatcagagtccatgtattgctggattcacaataaaattccgcatttctaccaaccaagaataaccttctaccgaacactaacgcgcatgatttataatgaggataataagtggatggtccaaactgccactgatcatgattgggtagcaaatattctgtagttgtatcagtttcagaatgtcctcccattacgtatataacattgtttatggatgccactgctggattacatctaggtttcagaagactcggcatattaacccaagcagcatccccgtggaaccaacgctcaacagatgtgggatttggtagacctcctactacgtataatttattgttagcgggtatcccgctagcatacagtctggggctattcatcggaggaattggaatccaattgtttgatatataatttacagctatagcattgttatgtatttcattgttcatccatccaccgatgagatatactacttctccaacatgagtacttgtacacatatggaatatatctataatttgatccatgttcataggatactctatgaatggatacttgtatgatttgcgtggttgtttatcacaatgaaatattttggtacagtctagtatccattttacattatttatacctctgggagaaagataatttgacctgattacatttttgataaggagtagcagatttcctaatttatttcttcgcctcatataccacttaatgacaaaatcaactacataatcctcatctggaacatttagttcatcgctttctagaataagtttcatagatagataatcaaaattgtctatgatgtcatcttccagttccaaaaagtgtttggcaataaagtttttagtatgacataagagattggatagtccgtattctatacccatcatgtaacactcgacacaatattcctttctaaaatctcgtaagataaagtttatacaagtgtagatgataaattctacagaggttaatatagaagcacgtaataaattgacgacgttatgactatctatatatacctttccagtatatgagtaaataactatagaagttaaactgtgaatgtcaaggtctagacaaacccttgtaactggatctttatttttcgtgtatttttgacgtaaatgtgtgcgaaagtaaggagataactttttcaatatcgtagaattgactattatattgcctcctatggcatcaataattgttttgaatttcttagtcatagacaatgctaatatattcttacagtacacagtattgacaaatatcggcatttatgtttctttaaaagtcaacatctagagaaaaatgattatctttttgagacataactcccattttttggtattcacccacacgtttttcgaaaaaattagtttttccttccaatgatatattttccatgaaatcaaacggattggtaacattataaatttttttaaatcccaattcagaaatcaatctatccgcgacgaattctatatatgttttcatcatttcacaattcattcctataagtttaactggaagagccgcagtaagaaattcttgttcaatggatactgcatctgttataatagatctaacggtttcttcactcggtggatgcaataaatgtttaaacatcaaacatgcgaaatcgcagtgcagaccctcgtctctactaattagttcgttggaaaacgtgagtccgggcattaggccacgctttttaagccaaaatatggaagcgaatgatccagaaaagaaaattccttctactgcagcaaaggcaataagtctctctccataaccggcgctgtcatgtatccacttttgagcccaatcggccttcttttttacacaaggcatcgtttctatggcattaaagagatagtttttttcattactatctttaacataagtatcgatcaaaagactatacatttccgaatgaatgttttcaatggccatctgaaatccgtagaaacatctagcctcggtaatctgtacttctgtacaaaatcgttccgccaaattttcattcactattccgtcactggctgcaaaaaacgccaatacatgttttataaaatatttttcgtctggtgttagtttattccaatcattgatatctttagatatatctacttcttccactgtccaaaatgatgcctctgcctttttatacatgttccagatgtcatgatattggattgggaaaataacaaatctatttggatttggtgcaaggatgggttccataactaaattaacaataacaataaattttttttcagttatctatatgcctgtacttggattttttgtacatcgatatcgccgcaatcactacaataattacaagtattattgatagcattgttattagtactatcataattaaattatctacattcatgggtgctgaataatcgttattatcatcattatcattttgtaattgtgacatcatactagataaatcgtttgcgagattgttgtgggaagcgggcatggaggatgcattatcattattatttaacgccttccatttggattcacaaatgttacgcacattcaacattttatggaaactataattttgtgaaaacaaataacaagaaaactcgtcatcgttcaaatttttaacgatagtaaaccgattaaacgtcgagctaatttctaacgctagcgactctgttggatatgggtttccagatatatatcttttcagttcccctacgtatctataatcatctgtaggaaatggaagatatttccatttatctactgttcctaatatcatatgtggtggtgtagtagaaccattaagcgcgaaagatgttatttcgcatcgtattttaacttcgcaataatttctggttagataacgcactctaccagtcaagtcaatgatattagcctttacagatatattcatagtagtcgtaacgatgactccatcttttagatgcgatactcctttgtatgtaccagaatcttcgtacctcaaactcgatatatttaaacaagttaatgagatattaacgcgttttatgaatgatgatatataaccagaagttttatcctcggtggctagcgctataaccttatcattataataccaactagtgtgattaatatgtgacacgtcagtgtgggtacaaatatgtacattatcgtctacgtcgtattcgatacatccgcatacagccaacaaatataaaatgacaaatactctaacgccgttcgtacccatcttgatgcggtttaataaatgttttgatttcaatttattgtaaaaaaagattcggttttatactgttcgatattctcattgcttatattttcatctatcatctccacacagtcaaatccgtggttagcatgcacctcatcaaccggtaaaagactatcggactcttctatcattataactctagaatatttaatttggtcattattaatcaagtcaattatcttatttttaacaaacgtgagtattttactcattttttataaaaacttttagaaatatacagactctatcgtgtgtctatatcttctttttatatccaatgtatttatgtctgatttttcttcatttatcatatataatggtccaaattctacacgtgcttcggattcatccagatcattaaggttcttataattgtaacatccttctcttccctcttctacatcttccttcttattcttattcttagcgtcacagaatctaccacagcaggatcccatgacgagcgtcatattaaactaatccattttcaattataatatatgattagtaatgaccattaaaataaaaaatattcttcataaccggcaagaaagtgaaaagttcacattgaaactatgtcagtagtatacatcatgaaatgatgatatatatatactctattttggtggaggattatatgatataattcgtggataatcatttttaagacacatttctttattcgtaaatcttttcacgttaaatgagtgtccatattttgcaatttcttcatatgatggcggtgtacgtggacgaggctgctcctgttcttgttgtggtcgccgactgtcgtgtctgcgtttagatccctccattatcgcgattgcgtagatggagtactattttataccttgtaattaaatttttttattaattaaacgtataaaaacgttccgtatctgtatttaagagccagatttcgtctaatagaacaaatagctacagtaaaaataactagaataattgctacacccactagaaaccacggatcgtaatacggcaatcggttttcgataataggtggaacgtatattttatttaaggacttaacaattgtctgtaaaccacaatttgcttccgcggatcctgtattaactatctgtaaaagcatatgttgaccgggcggagccgaacattctccgatatctaatttctgtatatctataatattattaacctccgcatacgcattacagttcttttctagcttggataccgcactaggtacatcgtctagatctattcctatttcctcagcgatagctcttctatccttttccggaagcaatgaaatcacttcaataaatgattcaaccatgagtgtgaaactaagtcgagaattactcatgcatttgttagttattcggagcgcgcaatttttaaactgtcctataacctctcctatatgaatagcacaagtgacattagtagggatagaatgttgagctaatttttgtaaataactatctataaaaagattatacaaagttttaaactctttagtttccgccatttatccagtctgagaaaatgtctctcataataaatttttccaagaaactaattgggtgaagaatggaaacctttaatctatatttatcacagtctgttttggtacacatgatgaattcttccaatgccgtactaaattcgatatctttttcgatttctggatatgtttttaataaagtatgaacaaagaaatggaaatcgtaataccagttatgtttaactttgaaattgttttttattttcttgttaatgattccagccacttgggaaaagtcaaagtcgtttaatgccgatttaatacgttcattaaaaacaaactttttatcctttagatgaattattattggttcattggaatcaaaaagtaagatattatcgggtttaagatctgcgtgtaaaaagttgtcgcaacagggtagttcgtagattttaatgtataacagagccatctgtaaaaagataaactttatgtattgtaccaaagatttaaatcctaatttgatagctaactcggtatctactttatctgccgaatacagtgctaggggaaaaattataatgtttcctctttcatattcgtagttagttctcttttcatgttcgaaaaagtgaaacatgcggttaaaatagtttataacattaatattactgttaataactgccggataaaagtgggatagtaatttcacgaatttgatactgtcctttctctcgttaaacgcctttaaaaaaactttagaagaatatctcaatgagagttcctgaccatccatagtttgtatcaataatagcaacatatgaagaacacgtttatacagagtatgtaaaaatgttaatttatagtttaatcccatggcccacgcacacacgattaattttttttcatctccctttagattgttgtatagaaatttgggtactgtgaactccgccgtagtttccatgggactatataattttgtggcctcgaatacaaattttactacatagttatctatcttaaagactataccatatcctcctgtagatatgtgataaaaatcgtcgtttataggataaaatcgtttatccttttgttggaaaaaggatgaattaatgtaatcattctcttctatctttagtagtgtttccttattaaaattcttaaaataatttaacaatctaactgacggagcccaattttggtgtaaatctaattgggacattatattgttaaaatacaaacagtctcctaatataacagtatctgataatctatggggagacatccattgatattcaggggatgaatcattggcaacacccatttattgtacaaaaagccccaatttacaaacgaaagtccaggtttgatagagacaaacaattaactattttgtctctgtttttaacacctccacagtttttaatttctttagtaatgaaattattcacaatatcagtatcttctttatctaccagagattttactaacttgataaccttggctgtctcattcaatagggtagtaatatttgtatgtgtgatattgatatctttttgaattgtttcttttagaagtgattctttgatggtgccagcatacgaattacaataatgcagaaactcggttaacatgcaggaattatagtaagccaattccaattgttgcctgtgttgtattagagtgtcaatatgagcaatggtgtccttgcgtttctctgatagaatgcgagcagcgattttggcgttatcatttgacgatatttctggaatgacgaatcctgtttctactaactttttggtaggacaaagtgaaacaatcaagaagatagcttctcctcctatttgtggaagaaattgaactcctctagatgatctactgacgatagtatctccttgacagatattggaccgaattacagaagtacctggaatgtaaagccctgaaaccccctcattttttaagcagattgttgccgtaaatcctgcactatgcccaagatagagagctcctttggtgaatccatctctatgtttcagtttaaccaagaaacagtcagctggtctaaaatttccatctctatctaatacagcatctaacttgatgtcaggaactatgaccggtttaatgttatatgtaacattgagtaaatccttaagttcataatcatcactgtcatcagttatgtacgatccaaacaatgtttctaccggcatagtggatacgaagatgctatccatcagaatgtttccctgattagtattttctatatagctattcttctttaaacgattttccaaatcagtaactatgttcatttttttaggagtaggacgcctagccagtatggaagaggattttctagatcctctcttcaacatctttgatctcgatggaatgcaaaaccccatagtgaaacaaccaacgataaaaataatattgtttttcactttttataattttaccatctgactcatggattcattaatatctttataagagctactaacgtataattctttataactgaactgagatatatacaccggatctatggtttccataattgagtaaatgaatgctcggcaataactaatggcaaatgtatagaacaacgaaattatactagagttgttaaagttaatattttctatgagctgttccaataaattatttgttgtgactgcgttcaagtcataaatcatcttgatactatccagtaaaccgtttttaagttctggaatattatcatcccattgtaaagcccctaattcgactatcgaatatcctgctctgatagcagtttcaatatcgacggacgtcaatactgtaataaaggtggtagtattgtcatcatcgtgataaactacgggaatatggtcgttagtaggtacggtaactttacacaacgcgatatataactttccttttgtaccatttttaacgtagttgggacgtcctgcagggtattgttttgaagaaatgatatcgagaacagatttgatacgatatttgttggattcctgattattcactataatataatctagacagatagatgattcgataaatagagaaggtatatcgttggtaggataatacatccccattccagtattctcggatactctattgatgacactagttaagaacatgtcttctattctagaaaacgaaaacatcctacatggactcattaaaacttctaacgctcctgattgtgtctcgaatgcctcgtacaaggatttcaaggatgccatagattctttgaccaacgatttagaattgcgtttagcatctgatttttttattaaatcgaatggtcggctctctggtttgctaccccaatgataacaatagtcttgtaaagataaaccgcaagaaaatttatacgcatccatccaaataaccctagcaccatcggatgatattaatgtattattatagattttccatccacaattattgggccagtatactgttagcaacggtatatcgaatagattactcatgtaacctactagaatgatagttcgtgtactagtcataatatctttaatccaatctaaaaaatttaaaattagattttttacactgttaaagttaacaaaagtattacccgggtacgtggatatcatatatggcattggtccattatcagtaatagctccataaactgatacggcgatggtttttatatgtgtttgatctaacgaggaagaaattcgcgcccacaattcatctctagatatgtatttaatatcaaacggtaacacatcaatttcgggacgcgtatatgtttctaaatttttaatccaaatataatgatgacctatatgccctattatcatactgtcaactatagtacacctagggaacttacgatacatctgtttcctataatcgttaaattttacaaatctataacatgctaaaccttttgacgacagccattcattaatttctgatatggaatctgtattctcgataccgtatcgttctaaagccagtgctatatctccctgttcgtgggaacgctttcgtataatatcgatcaacggataatctgaagtttttggagaataatatgactcatgatctatttcgtccataaacaatctagacataggaattggaggcgatgatcttaattttgtgcaatgagtcgtcaatcctataacttctaatcttgtaatattcatcatcgacataatactatctatgttatcatcgtatattagtataccatgaccttcttcatttcgtgccaaaatgatatacagtcttaaatagttacgcaatatctcaatagtttcataattgttagctgttttcatcaaggtttgtatcctgtttaacatgatggcgttctataacgtctctattttctatttttaattttttaaatttttaacgatttactgtggctagatacccaatctctctcaaatatttttttagcctcgcttacaagctgtttatctatactattaaaactgacgaatccgtgattttggtaatgggttccgtcgaaatttgccgaagtgatatgaacatattcgtcgtcgactatcaacaattttgtattattctgaatagtgaaaaccttcacagatagatcattttgaacacacaacgcatctagacttttggcggttgccatagaatatacgtcgttcttatcccaattaccaactagaagtctgatcttaactcctctattaatggctgcttctataatggagttgtaaatgtcgggccaatagtagctattaccgtcgacacgtgtagtgggaactatggccaaatgttcaatatctatactagtcttagctgacctgagtttatcaataactacatcggtatctagatctctagaatatcccaataggtgttccggagaatcagtaaagaacactccacctataggattcttaatatgatacgcagtgctaactggcaaacaacaagccgcagagcataaattcaaccatgaattttttgcgctattaaaggctttaaaagtatcaaatcttctacgaagatctgtggccagcgggggataatcagaatatacacctaacgttttaatcgtatgtatagatcctccagtaaatgacgcgtttcctacataacatctttcatcatctgacacccaaaaacaaccgagtagtagtcccacattattttttttatctatattaacggttataaaatttatatccgggcagtgactttgtagctctcccagatttcttttccctcgttcatctagcaaaactattattttaatccctttttcagatgcctcttttagtttatcaaaaataagcgctcccctagtcgtactcagaggattacaacaaaaagatgctatgtatatatatttcttagctagagtgataatttcgttaaaacattcaaatgttgttaaatgatcggatctaaaatccatattttctggtagtgtttctaccagcctacattttgctcccgcaggtaccgatgcaaatggccacatttagttaacataaaaacttatacatcctgttctatcaacgattctagaatatcatcggctatatcgctaaaattttcatcaaagtcgacatcacaacctaactcagtcaatatattaagaagttccatgatgtcatcttcgtctatttctatatccgtatccattgtagattgttgaccgattatcgagtttaaatcattactaatactcaatccttcagaatacaatctgtgtttcattgtaaatttataggcggtgtatttaagttggtagattttcaattatgtattaatatagcaacagtagttcttgctcctccttgattctagcatcctcttcattattttcttctacgtacataaacatgtccaatacgttagacaacacaccgacgatggcggccgcagatctcgagttatgatctacttccttaccgtgcaataaattagaatatattttctacttttacgagaaattaattattgtatttattatttatgggtgaaaaacttactataaaaagcgggtgggtttggaattagtgaaagcttaaaaattgaaattttattttttttttttggaatataaataagctcgaagtcgacagatctaggcctggtaccaggaggaggaattcagcttaaagatgacttcgaaagtttatgatccagaacaaaggaaacggatgataactggtccgcagtggtgggccagatgtaaacaaatgaatgttcttgattcatttattaattattatgattcagaaaaacatgcagaaaatgctgttatttttttacatggtaacgcggcctcttcttatttatggcgacatgttgtgccacatattgagccagtagcgcggtgtattataccagatcttattggtatgggcaaatcaggcaaatctggtaatggttcttataggttacttgatcattacaaatatcttactgcatggtttgaacttcttaatttaccaaagaagatcatttttgtcggccatgattggggtgcttgtttggcatttcattatagctatgagcatcaagataagatcaaagcaatagttcacgctgaaagtgtagtagatgtgattgaatcatgggatgaatggcctgatattgaagaagatattgcgttgatcaaatctgaagaaggagaaaaaatggttttggagaataacttcttcgtggaaaccatgttgccatcaaaaatcatgagaaagttagaaccagaagaatttgcagcatatcttgaaccattcaaagagaaaggtgaagttcgtcgtccaacattatcatggcctcgtgaaatcccgttagtaaaaggtggtaaacctgacgttgtacaaattgttaggaattataatgcttatctacgtgcaagtgatgatttaccaaaaatgtttattgaatcggatccaggattcttttccaatgctattgttgaaggcgccaagaagtttcctaatactgaatttgtcaaagtaaaaggtcttcatttttcgcaagaagatgcacctgatgaaatgggaaaatatatcaaatcgttcgttgagcgagttctcaaaaatgaacaagcggccgccgccaccatgagcaagggcgaggaactgttcactggcgtggtcccaattctcgtggaactggatggcgatgtgaatgggcacaaattttctgtcagcggagagggtgaaggtgatgccacatacggaaagctcaccctgaaattcatctgcaccactggaaagctccctgtgccatggccaacactggtcactaccttcacctatggcgtgcagtgcttttccagatacccagaccatatgaagcagcatgactttttcaagagcgccatgcccgagggctatgtgcaggagagaaccatctttttcaaagatgacgggaactacaagacccgcgctgaagtcaagttcgaaggtgacaccctggtgaatagaatcgagctgaagggcattgactttaaggaggatggaaacattctcggccacaagctggaatacaactataactcccacaatgtgtacatcatggccgacaagcaaaagaatggcatcaaggtcaacttcaagatcagacacaacattgaggatggatccgtgcagctggccgaccattatcaacagaacactccaatcggcgacggccctgtgctcctcccagacaaccattacctgtccacccagtctgccctgtctaaagatcccaacgaaaagagagaccacatggtcctgctggagtttgtgaccgctgctgggatcacacatggcatggacgagctgtacaagtgagcggccgccctgctagcaagcttgctagcggccgctcgagatctgcggccgctacagacacgaatatgactaaaccgatgaccatttaaaaacccctctctagctttcacttaaactgtatcgatcattcttttagcacatgtataatataaaaacattattctatttcgaatttaggcttccaaaaatttttcatccgtaaaccgataataatatatatagacttgttaatagtcggaataaatagattaatgcttaaactatcatcatctccacgattagagatacaatatttacattctttttgctgtttcgaaactttatcaatacacgttaatacaaacccaggaaggagatattgaaactgaggctgttgaaaatgaaacggtgaatacaataattcagataatgtaaaatcatgattccgtattctgatgatattagaactgctaatggatgtcgatggtatgtatctaggagtatctattttaacaaagcatcgatttgctaatatacaattatccttttgattaattgttattttattcatattcttaaaaggtttcatatttatcaattcttctacattaaaaatttccatttttaatttatgtagccccgcaatactcctcattacgtttcattttttgtctataatatccattttgttcatctcggtacatagattatccaattgagaagcgcatttagtagttttgtacattttaagtttattgacgaatcgtcgaaaactagttatagttaacattttattatttgataccctgatattaatacccctgccgttactattatttataactgatgtaatccacgtaacattggaattaactatcgatagtaatgcatcgacgcttccaaaattgtctattataaactcaccgataatttttttattgcatgttttcatattcattaggattatcaaatctttaatcttattacgattgtatgcgttgatattacaagacgtcattctaaaagacggaggatctccatcaaatgccagacaatcacgtacaaagtacatggaaataggttttgttctattgcgcatcatagatttatatagaacacccgtagaaatactaatttgttttactctataaaatactaatgcatctatttcatcgttttgtataacgtctttccaagtgtcaaattccaaatttttttcattgatagtaccaaattcttctatctctttaactacttgcatagataggtaattacagtgatgcctacatgccgttttttgaaactgaatagatgcgtctagaagcgatgctacgctagtcacaatcaccactttcatatttagaatatatatatgtaaaaatatagtagaatttcattttgtttttttctatgctataaatgaattctcattttgcatctgctcatactccgttttatattaataccaaagaaggaagatatctggttctaaaagccgttaaagtatgcgatgttagaactgtagaatgcgaaggaagtaaagcttcctgcgtactcaaagtagataaaccctcatcgcccgcgtgtgagagaagaccttcgtccccgtccagatgcgagagaatgaataaccctggaaaacaagttccgtttatgaggacggacatgctacaaaatatgttcgcggctaatcgcgataatgtagcttctagacttttgtcctaaaatactattatatccttttcgatattaataaatccgtgtcgtccaggttttttatctctttcagtatgtgaatagataggtattttatctctattcatcatcgaatttaagagatccgataaacattgtttgtattctccagatgtcagcatctgatacaacaatatatgtgcacataaacctctggcacttatttcatgtaccttccccttatcactaaggagaatagtatttgagaaatatgtatacatgatattatcatgaattagatatacagaatttgtaacactctcgaaatcacacgatgtgtcggcgttaagatctaatatatcactcgataacacattttcatctagatacactagacattttttaaagctaaaatagtctttagtagtaacagtaactatgcgattattttcatcgatgatacatttcatcggcatattattacgcttaccatcaaagactataccatgtgtatatctaacgtattctagcatggttgccatacgcgcattaaacttttcaggatctttggatagatcttccaatctatctatttgagaaaacatttttatcatgttcaatagttgaaacgtcggatccactatatagatattatctataaagattttaggaactacgttcatggtatcctggcgaatattaaaactatcaatgatatgattatcgttttcatcttttatcaccatatagtttctaagatatgggattttacttaatataatattatttcccgtgataaattttattagaaaggccaaatctataagaaaagtcctagaattagtctgaagaatatctatatcgccgtatagtatatttggattaattagatatagagaatatgatccgtaacatatacaacttttattatggcgtctaagatattcttccatcaacttattaacatttttgactagggaagatacattatgacgtcccattacttttgccttgtctattactgcgacgttcatagaatttagcatatctcttgccaattcttccattgatgttacattataagaaattttagatgaaattacatttggagctttaatagtaagaactcctaatatgtccgtgtatgtggtcactaatacagattgtagttctataatcgtaaataatttacctatattatatgtttgagtctgtttagaaaagtagctaagtatacgatcttttatttctgatgcagatgtattaacatcggaaaaaaatctttttttattcttttttactaaagatacaaatatgtctttgttaaaaacagttattttctgaatatttctagcttgtaattttaacatatgatattcgttcacactaggtactctgcctaaataggtttctataatctttaatgtaatattaggaaaagtattctgatcaggattcctattcattttgaggatttaaaactctgattattgtctaatatggtctctacgcaaactttttcacagagcgatagagtttttgataactcgtttttcttaagaaatataaaactactgtctccagagctcgctctatcttttattttatctaattcgatacaaactcctgatactggttcagaaagtaattcattaattttcagtcctttatagaagatatttaatatagataatacaaaatcttcagtttttgatatcgatctgattgatcctagaactagatatattaataacgtgctcattaggcagtttatggcagcttgataattagatatagtatattccagttcatatttattagataccgcattgcccagattttgatattctatgaattcctctgaaaataaatccaaaataactagacattctattttttgtggattagtgtactctcttccctctatcatgttcactactggtgtccacgatgataaatatctagagggaatataatatagtccataggatgccaatctagcaatgtcgaataactgtaattttattcttcgctcttcattatgaattgattcttgaggtataaacctaacacaaattatattattagacttttcgtatgtaatgtctttcatgttataagtttttaatcctggaatagaatctattttaatgaggcttttaaacgcagagttctccaacgagtcaaagcataatactctgttgtttttcttatatacgatgttacgattttcttctttgaatggaataggtttttgaattagtttataattacaacataatagataaggaagtgtgcaaatagtacgcggaaaaaacataatagctcccctgttttcatccatggttttaagtaaatgatcactggcttctttagtcaatggatattcgaacattaaccgtttcatcatcattggacagaatccatatttcttaatgtaaagagtgatcaaatcattgtgtttattgtaccatcttgttgtaaatgtgtattcggttatcggatctgctcctttttctattaaagtatcgatgtcaatctcgtctaagaattcaactatatcgacatatttcatttgtatacacataaccattactaacgtagaatgtataggaagagatgtaacgggaacagggtttgttgattcgcaaactattctaatacataattcttctgttaatacgtcttgcacgtaatctattatagatgccaagatatctatataattattttgtaagatgatgttaactatgtgatctatataagtagtgtaataattcatgtattttgatatatgttccaactctgtctttgtgatgtctagtttcgtaatatctatagcatcctcaaaaaatatattcgcatatattcccaagtcttcagttctatcttctaaaaaatcttcaacgtatggaatataataatctattttacctcttctgatatcattaatgatatagtttttgacactatcttctgtcaattgattcttattcactatatctaagaaacggatagcgtccctaggacgaactactgccattaatatctctattatagcttctggacataattcatctattataccagaattaatgggaactattccgtatctatctaacatagttttaagaaagtcagaatctaagacttgatgttcatatattggttcatacatgaaatgatctctattgatgatagtgactatttcattctctgaaaattggtaactcattctatatatgctttccttgttgatgaaggatagaatatactcaatagaatttgtaccaacaaactgttctcttatgaatcgtatatcatcatctgaaataatcatgtaaggcatacatttaacaattagagacttgtctcctgttatcaatatactattcttgtgataatttatgtgtgaggcaaatttgtccacgttctttaattttgttatagtagatatcaaatccaatggagctacagttcttggcttaaacagatatagtttttctggaacaaattctacaacattattataaaggactttgggtagataagtgggatgaaatcctattttaattaatgcgatagccttgtcctcgtgcagatatccaaacgcttttgtgatagtatggcattcattgtctagaaacgctctacgaatatctgtgacagatatcatctttagagaatatactagtcgcgttaatagtactacaatttgtattttttaatctatctcaataaaaaaattaatatgtatgattcaatgtataactaaactactaactgttattgataactagaatcagaatctaatgatgacgtaaccaagaagtttatctactgccaatttagctgcattatttttagcatctcgtttagattttccatcggccttatcgaatactcttccgtcgatgtctacacaggcataaaatgtaggagagttactaggcccaactgattcaatacgaaaagaccaatctctcctagtaatttggcagtactcattaataacggtgacagggttagcatctttccaatcaataatttttttagccggaataacatcatcaaaagacttatgatcctctctcattgatttttcgcgggatacatcatctattatgacgtcagccatagcatcagcatccggcttatccgcctccgttgtcataaaccaacgaggaggaatatcgtcggagctgtacaccatagcactacgttgaagatcgtacagagctttattaacttctcgcttctccatattaagttgtctagttagttgtgcagcagtagctccttcgattccaatgtttttaatagccgcacacacaatctctgcgtcagaacgctcgtcaatatagatcttagacatttttagagagaactaacgcaaccagcaataaaactgaacctactttatcatttttttattcatcatcctctggtggttcgtcgttcctatcaaatgtagctctgattaacccgtcatctataggtgatgctggttctggagattctggaggagatggattattatctggaagaatctctgttatttccttgttttcatgtatcgattgcgttgtaacattaagattgcgaaatgctctaaatttgggaggcttaaagtgttgtttgcaatctctacacgcgtgtctaactagtggaggttcgtcagctgctctagtttgaatcatcatcggcgtagtattcctacttttacagttaggacacggtgtattgtatttctcgtcgagaacgttaaaataatcgttgtaactcacatcctttattttatctatattgtattctactcctttcttaatgcattttataccgaataagagatagcgaaggaattctttttcggtgccgctagtacccttaatcatatcacatagtgttttatattccaaatttgtggcaatagacggtttatttctatacgatagtttgtttctggaatcctttgagtattctataccaatattattctttgattcgaatttagtttcttcgatattagattttgtattacctatattcttgatgtagtactttgatgatttttccatggcccattctattaagtcttccaagttggcatcatccacatattgtgatagtaattctcggatatcagtagcggctaccgccattgatgtttgttcattggatgagtaactactaatgtatacattttccatttataacacttatgtattaactttgttcatttatattttttcattattatgttgatattaacaaaagtgaatatatatatgttaataattgtattgtggttatacggctacaattttataatgagtgaaagtcagtgtccgatgatcaatgacgatagctttactctgaaaagaaagtatcaaatcgatagtgcggagtcaacaataaaaatggataagaagaggataaagtttcagaatagagccaaaatggtaaaagaaataaatcagacaataagagcagcacaaactcattacgagacattgaaactaggatacataaaatttaagagaatgattatgactactactctagaagatatagcaccatctattccaaataatcagaaaacttataaactattctcggacatttcagccatcggcaaagcatcacagaatccgagtaagatggtatatgctctgctgctttacatgtttcccaatttgtttggagatgatcatagattcattcgttatagaatgcatccaatgagtaaaatcaaacacaagatcttctctcctttcaaacttaatcttattagaatattagtggaagaaagattctataataatgaatgcagatctaataaatggagaataattggaacacaagttgataaaatgttgatagctgaatctgataaatatacaatagatgcaaggtataacctaaaacccatgtatagaatcaagggagaatctgaagaagataccctctttatcaaacagatggtagaacaatgtgtgacatcccaggaattggtggaaaaagtgttgaagatactgtttagagatttgttcaagagtggagaatacaaagcgtacagatacgatgatgatgtagaaaatggatttattggattggatacactaaaattaaacattgttcatgatatagttgaaccatgtatgcctgttcgtaggccagtggctaagatactgtgtaaagaaatggtaaataaatactttgagaatccgctacatattattggtaaaaatcttcaagagtgcattgactttgttagtgaataggcatttcatctttctccaatactaattcaaattgttaaattaataatggatagtataaatagttattagttataagatagtaaaaataattattagaataagagtgtagtatcatagataactctcttctataaaaatggattttattcgtagaaagtatcttatatacacagtagaaaataatatagattttttaaaggatgatacattaagtaaagtaaacaattttaccctcaatcatgtactagctctcaagtatctagttagcaattttcctcaacacgttattactaaggatgtattagctaataccaatttttttgttttcatacatatggtacgatgttgtaaagtgtacgaagcggttttacgacacgcatttgatgcacccacgttgtacgttaaagcattgactaagaattatttatcgtttagtaacgcaatacaatcgtacaaggaaaccgtgcataaactaacacaagatgaaaaatttttagaggttgccgaatacatggacgaattaggagaacttataggcgtaaattatgacttagttcttaatccattatttcacggaggggaacccatcaaagatatggaaatcatttttttaaaactgtttaagaaaacagacttcaaagttgttaaaaaattaagtgttataagattacttatttgggcatacctaagcaagaaagatacaggcatagagtttgcggataatgatagacaaaatatatacactctatttcaacaaactggtagaatcgtccatagcaatctaacagaaacgtttagagattatatctttcccggagataagactagctattgggtgtggttaaacgaaagtatagctaatgatgcggatatcgttcttaatagacacgccattaccatgtatgataaaattcttagttatatatactctgagataaaacaaggacgcgttaataaaaacatgcttaagttagtttatatctttgagcctgaaaaagatatcagagaacttctgctagaaatcatatatgatattcctggagatatcctatctattattgatgcaaaaaacgacgattggaaaaaatattttattagtttttataaagctaattttattaacggtaatacatttattagtgatagaacgtttaacgaggacttattcagagttgttgttcaaatagatcccgaatatttcgataatgaacgaattatgtctttattctctacgagtgctgcggacattaaacgatttgatgagttagatattaataacagttatatatctaatataatttatgaggtgaacgatatcacattagatacaatggatgatatgaagaagtgtcaaatctttaacgaggatacgtcgtattatgttaaggaatacaatacatacctgtttttgcacgagtcggatcccatggtcatagagaacggaatactaaagaaactgtcatctataaaatccaagagtagacggctgaacttgtttagcaaaaacattttaaaatattatttagacggacaattggctcgtctaggtcttgtgttagatgattataaaggagacttgttagttaaaatgataaaccatcttaagtctgtggaggatgtatccgcattcgttcgattttctacagataaaaaccctagtattcttccatcgctaatcaaaactattttagctagttataatatttccatcatcgtcttatttcaaaggtttttgagagataatctatatcatgtagaagaattcttggataaaagcatccatctaaccaagacggataagaaatatatacttcaattgataagacacggtagatcatagaacagaccaaatatattattaataatttgtatatacatagatataattatcacacatttttgataaatgggaactgctgcaacaattcagactcccaccaaattaatgaataaagaaaatgcagaaatgattttggaaaaaattgttgatcatatagttatgtatattagtgacgaatcaagtgattcagaaaataatcctgaatatattgattttcgtaacagatacgaagactatagatctctcattataaaaagtgatcacgagtttgtaaagctatgtaaaaatcatgcggagaaaagttctccagaaacgcaacaaatgattatcaaacacatatacgaacaatatcttattccagtatctgaagtactattaaaacctataatgtccatgggtgacataattacatataacggatgtaaagacaatgaatggatgctagaacaactctctaccctaaactttaacaatctccgcacatggaactcatgtagcataggcaatgtaacgcgtctgttttatacattttttagttatctgatgaaagataaactaaatatataagtataatcccattctaatactttaacctgatgtattagcatcttattagaatattaacctaactaaaagacataacataaaaactcattacatagttgataaaaagcggtaggatataaatattatggctgccaccgttccgcgttttgacgacgtgtacaaaaatgcacaaagaagaattctagatcaagaaacattttttagtagaggtctaagtagaccgttaatgaaaaacacatatctatttgataattacgcgtatggatggataccagaaactgcaatttggagtagtagatacgcaaacctagatgctagtgactattatcccatttcgttgggattacttaaaaagttcgagtttctcatgtctctatataaaggtcctattcccgtatatgaagaaaaagtaaatactgaattcatagccaatggatcgttctctggtagatacgtatcatatcttcgaaagttttctgcccttccaacaaacgagtttattagttttttgttactgacttccattccaatctataatatcttgttctggtttaaaaacacacagtttgatattactaaacacacattattcagatacgtctatacagataatgccaaacacctggcgttggctaggtatatgcatcaaacaggagactataagcctttgtttagtcgtctcaaagagaattatatatttaccggtcccgttccaataagtatcaaagatatagatcaccctaatcttagtagagcaagaagtccatccgattatgagacattagctaatattagtactatattgtactttaccaagtatgatccggtattaatgtttttattgttttacgtacctgggtattcaattactacaaaaattactccagccgtagaatatctaatggataaactgaatctaacaaagagcgacgtacaactgttgtaaattattttatgcttcgtaaaatgtaggttttgaaccaaacattctttcaaagaatgagatgcataaaactttattatccaatagattgactatttcggacgtcaatcgtttaaagtaaacttcgtaaaatattctttgatcactgccgagtttaaaacttctatcgataattgtctcatatgttttaatatttacaagttttttggtccatggtacattagccggacaaatatatgcaaaataatatcgttctccaagttctatagtttctggattatttttattatattcagtaactaaatacatattagggttatctgcggatttataatttgagtgatgcattctactcaacataaataattctagaggagacgatctactatcaaattcggatcgtaaatctgtttctaaagaacggagaatatctatacatacctgattagaattcatccgtccttcagacaacatctcagacagtctggttttgtacatcttaatcatattcttatgaaacttggaaacatctcttctagtttcactagtacctttattaattctctcaggtacagattttgaattcgacgatgctgagtatttcatcgttgtatatttcttcttcgattgcataatcagattcttatataccgcctcaaactctattttaaaattattaaacaatactctattattaatcagtcgttctaactctttcgctatttctatagacttatctacatcttgactgtctatctctgtaaacacggagtcggtatctccatacacgctacgaaaacgaaatctgtaatctataggcaacgatgttttcacaatcggattaatatctctatcgtccatataaaatggattacttaatggattggcaaaccgtaacataccgttagataactctgctccatttagtaccgattctagatacaagatcattctacgtcctatggatgtgcaactcttagccgaagcgtatgagtatagagcactatttctaaatcccatcagaccatatactgagttggctactatcttgtacgtatattgcatggaatcatagatggccttttcagttgaactggtagcctgttttagcatctttttatatctggctctctctgccaaaaatgttcttaatagtctaggaatggttccttctatcgatctatcgaaaattgctatttcagagatgaggttcggtagtctaggttcacaatgaaccgtaatatatctaggaggtggatatttctgaagcaatagctgattatttatttcttcttccaatctattggtactaacaacgacaccgactaatgtttccggagatagatttccaaagatacacacattaggatacagactgttataatcaaagattaatacattattactaaacattttttgttttggagcaaataccttaccgccttcataaggaaacttttgttttgtttctgatctaactaagatagttttagtttccaacaatagctttaacagtggacccttgatgactgtactcgctctatattcgaataccatggattgaggaagcacatatgttgacgcacccgcgtctgtttttgtttctactccataatactcccacaaatactgacacaaacaagcatcatgaatacagtatctagccatatctaaagctatgtttagattataatccttatacatctgagctaaatcaacgtcatcctttccgaaagataatttatatgtatcattaggtaaagtaggacataatagtacgactttaaatccattttcccaaatatctttacgaattactttacatataatatcctcatcaacagtcacataattacctgtggttaaaacctttgcaaatgcagcggctttgcctttcgcgtctgtagtatcgtcaccgatgaacgtcatttctctaactcctctatttaatactttacccatgcaactgaacgcgttcttggatatagaatccaatttgtacgaatccaatttttcaaatttttgaatgaatgaatatagatcgaaaaatatagttccattattgttattaacgtgaaacgtagtattggccatgccgcctactcccttatgactagactgatttctctcataaatacagagatgtacagcttcctttttgtccggagatctaaagataattttctctcctgttaataactctagacgattagtaatatatctcagatcaaagttatgtccgttaaaggtaacgacgtagtcgaacgttagttccaacaattgtttagctattcgtaacaaaactatttcagaacatagaactagttctcgttcgtaatccatttccattagtgactgtatcctcaaacatcctctatcgacggcttcttgtatttcctgttccgttaacatctcttcattaatgagcgtaaacaataatcgtttaccacttaaatcgatataacagtaacttgtatgcgagattgggttaataaatacagaaggaaacttcttatcgaagtgacactctatatctagaaataagtacgatcttgggatatcgaatctaggtatttttttagcgaaacagttacgtggatcgtcacaatgataacatccattgttaatctttgtcaaatattgctcgtccaacgagtaacatccgtctggagatatcccgttagaaatataaaaccaactaatattgagaaattcatccatggtggcattttgtatgctgcgtttctttggctcttctatcaaccacatatctgcgacggagcattttctatctttaatatctagattataacttattgtctcgtcaatgtctatagttctcatctttcccaacggcctcgcattaaatggaggaggagacaatgactgatatatttcgtccgtcactacgtaataaaagtaatgaggaaatcgtataaatacggtctcgccatttcgacatctggatttcagatataaaaatctgttttcaccgtgactttcaaaccaattaatgcaccgaacatccatttatagaatttagaaatatattttcatttaaatgaatcccaaacattggggaagagccgtatggaccattatttttatagtactttcgcaagcgggtttagacggcaacatagaagcgtgtaaacgaaaactatatactatagttagcactcttccatgtcctgcatgtagacggcacgcgactatcgctatagaggacaataatgtcatgtctagcgatgatctgaattatatttattattttttcatcagattatttaacaatttggcatctgatcccaaatacgcgatcgatgtgacaaaggttaaccctttataaacttaacccattataaaacttatgattagtcacaactgaaataaccgcgtgattattttttggtataattctacacggcatggtttctgtgactatgaattcaacccccgttacattagtgaaatctttaacaaacagcaagggttcgtcaaagacataaaactcattgtttacaatcgaaatagaccccctatcacacttaaaataaaaaatatccttatcctttaccaccaaataaaattctgattggtcaatgtgaatgtattcacttaacagttccacaaatttatttattaactccgaggcacatacatcgtcggtattttttatggcaaactttactcttccagcatccgtttctaaaaaaatattaacgagttccatttatatcatccaatattattgaaatgacgttgatggacagatgatacaaataagaaggtacggtacctttgtccaccatctcctccaattcatgctctattttgtcattaactttaatgtatgaaaacagtacgccacatgcttccatgacagtgtgtaacactttggatacaaaatgtttgacattagtataattgtccaagactgtcaatctataatagatagtagctataatatattctatgatggtattgaagaagatgacaaccttggcatattgatcatttaacacagacatggtatcaacagatagcttgaatgaaagagaatcagtaattggaataagcgtcttctcgatagagtgtccgtataccaacatgtctgatattttgatgtattccattaaattatttagttttttctttttattctcgttaaacagcatttctgtcaacggaccccaacatcgttgaccgattaagttttgattgatttttccgtgtaaggcgtatctagtcagatcgtatagcctatccaataatccatcgtctgtgtgtagatcacatcgtacactttttaattctctatagaagagcgacagacatctggagcaattacagacagcaatttctttattctctacagatgtaagatacttgaagacattcctatgatgatgcagaattttggataacacggtattgatggtatctgttaccataattcctttgatggctgatagtgtcagagcacaagatttccaatctttgacaatttttagcaccattatctttgttttgatatctatatcagacagcatggtgcgtctgacaacacagggattaagacggaaagatgaaatgattctctcaacatcttcaatagataccttgctattttttctggcattatctatatgtgcgagaatatcctctagagaatcagtatcctttttgatgatagtggatctcaatgacatgggacgtttaaaccttcttattctatcaccagattgcatggtgatttgtcttctttcttttatcataatgtaatctctaaattcatcggcaaattgtctatatctaaaatcataatatgagatgtttacctctacaaatatctgttcgtccaatgttagagtatttacatcagttttgtattccaaattaaacatggcaacggatttaattttatattcctctattaagtcctcgtcgataataacagaatgtagataatcatttaatccgtcgtacatggttggaagatgcttgttgacaaaatctttaattgtcttgatgaaggtgggactatatctaacatcttgattaataaaatttataacattgtccataggatactttgtaactagttttatacacatctcttcatcggtaagtttagacagaatatcgtgaacaggtggtatattatattcatcagatatacgaagaacaatgtccaaatctatattgtttaatatattatatagatgtagcgtagctcctacaggaatatctttaactaagtcaatgatttcatcaaccgttagatctattttaaagttaatcatataggcattgatttttaaaaggtatgtagccttgactacattctcattaattaaccattccaagtcattgtgtgtaagaagattatattctatcataagcttgactacatttggtcccgataccattaaagaattcttatgatataaggaaacagattttaggtactcatctactctacaagaattttggagagccttaacgatatcagtgacgtttattatttcaggaggaaagaatctaacattgagaatatcggaattaatagcttccagatacagtgattttggcaatagtccgtgtaatccataatccagtaacacgagctggtgcttgctagacaccttttcaatgtttaatttttttgaaataagctttgataaagccttcctcgcaaattccggatacatgaacatgtcggcgacatgattaagtattgttttttcattatttttatattttctcaacaagttctcaataccccaatagatgatagaatatcacccaatgcgtccatgttgtctatttccaacaggtcgctatatccaccaatagaagtttttccaaaaaagattctaggaacagttctaccaccagtaatttgttcaaaataatcccgcaattcattttcgggtttaaattctttaatatcgacaatttcatacgctcctcttttgaaactaaacttatttagaatatccagtgcatttctacaaaaaggacatgtatacttgacaaaaattgtcactttgttattggccaacctttgttgtacaaattcctcggccattttaatatttaagtgatataaaactatctcgacttatttaactctttagtcgagatatatggacgcagatagctatatgatagccaactacagaaggcaaacgctataaaaaacataattacgacgagcatatttataaatatttttattcagcattacttgatatagtaatattaggcacagtcaaacattcaaccactctcgatacattaactctctcattttctttaacaaattctgcaatatcttcgtaaaaagattcttgaaactttttagaatatctatcgactctagatgaaatagcgttcgtcaacatactatgttttgtatacataaaggcgcccattttaacagtttctagtgacaaaatgctagcgatcctaggatcctttagaatcacatagattgacgattcgtctctcttagtaactctagtaaaataatcatacaatctagtacgcgaaataatattatccttgacttgaggagatctaaacaatctagttttgagaacatcgataagttcatcgggaatgacatacatactatctttaatagaactcttttcatccagttgaatggattcgtccttaaccaactgattaatgagatcttctattttatcattttccagatgatatgtatgtccattaaagttaaattgtgtagcgcttctttttagtctagcagccaatactttaacatcactaatatcgatatacaaaggagatgatttatctatggcattaagaattcgtttttcgacatccgtcaaaaccaattcctttttgcctgtatcatccagttttccatcctttgtaaagaaattattttctactagactattaataagactgataaggattcctccataattgcacaatccaaactttttaacaaaactagactttacgagatctacaggaatgcgtacttcaggttttttagcttgtgattttttcttttgcggacattttctagtaaccaactcatctaccatttcattgattttagcagtgaaataagctttcaatgcacgggcactgatactattgaaaacgagttgatcttcaaattccgccatttaagttcaccaaacaacttttaaatacaaatatatcaatagtagtagaataagaactataaaaaaaataataattaaccaaccccaacaaccggtattattagttgatgtggtagttttctcatcacttagaacagatttaacaatttctataaagtctgtcaaatcatcttccggagaccccataaatacaccaaatatagcggcgtacaacttatccatttatacattgaatattggcttttctttatcgctatcttcatcatattcatcatcaatatcaacaagtcccagattacgagccagatcttcttctacattttcagtcattgatacacgttcactatctccagagagtccgataacgttagccaccacttctctatcaatgattagtttcttgagcgcgaaagtaatttttgtttccgttccggatctatagaagacgataggtgtgataattgccttggccaattgtctttctcttttactgagtgattctagttcaccttctatagatctgagaatggatgattctccagtcgaaacatattctaccatggatccgtttaatttgttgatgaagatggattcatccttaaatgttttctctgtaatagtttccaccgaaagactatgcaaagaatttggaatgcgttccttgtgcttaatgtttccatagacggcttctagaagttgatacaacataggactagccgcggtaacttttatttttagaaagtatccatcgcttctatcttgtttagatttatttttataaagtttagtctctccttccaacataataaaagtggaagtcatttgactagataaactatcagtaagttttatagagatagacgaacaattagcgtattgagaagcatttagtgtaacgtattcgatacattttgcattagatttactaatcgattttgcatactctataacacccgcacaagtctgtagagaatcgctagatgcagtaggtcttggtgaagtttcaactctcttcttgattaccttactcatgattaaacctaaataattgtactttgtaatataatgatatatattttcactttatctcatttgagaataaaaatgtttttgtttaaccactgcatgatgtacagatttcggaatcgcaaaccaccagtggttttattttatccttgtccaatgtgaattgaatgggagcggatgcgggtttcgtacgtagatagtacattcccgtttttagaccgagactccatccgtaaaaatgcatactcgttagtttggaataactcggatctgctatatggatattcatagattgactttgatcgatgaaggctcccctgtctgcagccatttttatgatcgtcttttgtggaatttcccaaatagttttataaactcgcttaatatcttctggaaggtttgtattctgaatggatccaccatctgccataatcctattcttgatctcatcattccataattttctctcggttaaaactctaaggagatgcggattaactacttgaaattctccagacaatactctccgagtgtaaatattactggtatacggttccaccgactcattatttcccaaaatttgagcagttgatgcagtcggcataggtgccaccaataaactatttctaagaccgtatgttctgattttatcttttagaggttcccaattccaaagatccgacggtacaacattccaaagatcatattgtagaataccgttactggcgtacgatcctacatatgtatcgtatggtccttccttctcagctagttcacaactcgcctctaatgcaccgtaataaatggtttcgaagatcttcttatttagatcttgtgcttccaggctatcaaatggataatttaagagaataaacgcgtccgctaatccttgaacaccaataccgataggtctatgtctcttattagagatttcagcttctggaataggataataattaatatctataattttattgagatttctgacaattactttgaccacatccttcagtttgagaaaatcaaatcgcccatctattacaaacatgttcaaggcaacagatgccagattacaaacggctacctcattagcatccgcatattgtattatctcagtgcaaagattactacacttgatagttcctaaattttgttgattactctttttgttacacgcatccttataaagaatgaatggagtaccagtttcaatctgagattctataatcgctttccagacgactcgagcctttattatagatttgtatctcctttctctttcgtatagtgtatacaatcgttcgaactcgtctccccaaacattgtccaatccaggacattcatccggacacatcaacgaccactctccgtcatccttcactcgtttcataaagagatcaggaatccaaagagctataaatagatctctggttctatgttcctcgtttcctgtattctttttaagatcgaggaacgccataatatcagaatgccacggttccaagtatatggccataactccaggccgtttgtttcctccctgatctatgtatctagcggtgttattataaactctcaacattggaataataccgtttgatataccattggtaccggagatatagcttccactggcacgaatattactaattgatagacctattccccctgccattttagagattaatgcgcatcgttttaacgtgtcatagataccctctatgctatcatcgatcatgttaagtagaaaacagctagacatttggtgacgactagttcccgcattaaataaggtaggagaagcgtgcgtaaaccatttttcagaaagtagattgtacgtctcaatagctgagtctatatcccattgatgaattcctactgcgacacgcattaacatgtgctgaggtctttcaacgatcttgttgtttattttcaacaagtaggatttttccaaagttttaaaaccaaaatagttgtatgaaaagtctcgttcgtaaataataaccgagttgagtttatccttatatttgttaactatatccatggtgatacttgaaataatcggagaatgtttcccatttttaggattaacatagttgaataaatcctccatcacttcactaaatagtttttttgtttccttgtgtagatttgatacggctattctggcggctagaatggcataatccggatgttgtgtagtacaagtggctgctatttcggctgccagagtgtccaattctaccgttgttactccattatatattccttgaataaccttcatagctattttaataggatctatatgatccgtgtttaagccataacataattttctaatacgagacgtgattttatcaaacatgacattttccttgtatccatttcgtttaatgacaaacatttttgttggtgtaataaaaaaattatttaacttttcattaatagggatttgacgtatgtagcgtacaaaatgattgttcctggtatatagataaagagtcctatatatttgaaaatcgttacggctcgattaaactttaatgattgcatagtgaatatatcattaggatttaactccttgactatcatggcggcgccagaaattaccatcaaaagcattaatacagttataccgatcgcagttagaacggttatagcatccaccatttatatctaaaaattagatcaaagaatatgtgacaaagtcctagttgtatactgagaattgacgaaacaatgtttcttacatatttttttcttattagtaaccgacttaatagtaggaactggaaaactagacttgattattctataagtatagatacccttccaaataatattctctttgataaaagttccagaaaatgtagaattttttaaaaagttatcttttgctattaccaagattgtgtttagacgcttattattaatatgagtgatgaaatccacaccgcctctagatatcgcctttatttccacattagatggtaaatccaatagtgaaactatctttttaggaatgtatggactcgcgtttagaggagtaaacgtcttaggcgtcggaaaggatgattcatcaaacgaataaacaatttcacaaatggatgttaatgtattagtaggaaattttttgacgctattggaattgaagattctaatggatgatgttctacctatttcatccgataacatgttaatttccgacaccaacggttttaatatttcgatgatatacggtagtctctctttcggacttatatagcttattccacaatacgagtcattatatactccaaaaaacaaaataactagtataaaatctgtatcgaatgggaaaaacgaaattatcgacataggtatagaatccggaacattgaacgtattaatacttaattctttttctgtggtaagtaccgataggttattgacattgtatggttttaaatattctataacttgagacttgatagatattagtgatgaattgaaaattatttttatcaccacgtgtgtttcaggatcatcgtcgacgcccgtcaaccaaccgaacggagtaaaataaatatcattaatatatgctctagatattagtatttttatcaatcctttgattatcatcttctcgtaggcgaatgattccatgatcaagagtgatttaagaacatcctccggagtattaatgggcttagtaaacagtccatcgttgcaataataaaagttatccaagttaaaggatattatgcattcgtttaaagatatcacctcatctgacggagacaattttttggtaggttttagagactttgaagctacttgtttaacaaagttattcatcgtcgtctactattctatttaattttgtagttaatttatcacatatcacattaattgactttttggtccacttttccatacgtttatattcttttaatcctgcgttatccgtttccgttatatccagggatagatcttgcaagttaaatagaatgctcttaaataatgtcattttcttatccgctaaaaatttaaagaatgtataaacctttttcagagatttgaaactcttaggtggtgtcctagtacacaatatcataaacaaactaataaacattccacattcagattccaacagctgattaacttccacattaatacagcctattttcgctccaaatgtacattcgaaaaatctgaataaaacatcgatgtcacaatttgtattatccaatacagaatgtttgtgattcgtgttaaaaccatcggagaaggaatagaaataaaaattattatagtggtggaattcagttggaatattgcctccggagtcataaaaggatactaaacattgttttttatcataaattacacatttccaatgagacaaataacaaaatccaaacattacaaatctagaggtagaacttttaattttgtctttaagtatatacgataagatatgtttattcataaacgcgtcaaatttttcatgaatcgctaaggagtttaagaatctcatgtcaaattgtcctatataatccacttcggatccataagcaaactgagagactaagttcttaatacttcgattgctcatccaggctcctctctcaggctctattttcatcttgacgacctttggattttcaccagtatgtattcctttacgtgataaatcatcgattttcaaatccatttgtgagaagtctatcgccttagatactttttcccgtagtcgaggtttaaaaaaatacgctaacggtatactagtaggtaactcaaagacatcatatatagaatggtaacgcgtctttaactcgtcggttaactctttcttttgatcgagttcgtcgctactattgggtctgctcaggtgccccgactctactagttccaacatcataccgataggaatacaagacactttgccggcggttgtagatttatcatatttttccactacatatccgttacaatttgttaaaaatttagatacatctatattgctacataatccagctagtgaatatatatgacataataaattggtaaatcctagttctggtattttactaattactaaatctgtatatctttccatttatcatggaaaagaatttaccagatatcttcttttttccaaactgcgttaatgtattctcttacaaatattcacaagatgaattcagtaatatgagtaaaacggaacgtgatagtttctcattggccgtgtttccagttataaaacatagatggcataacgcacacgttgtaaaacataaaggaatatacaaagttagtacagaagcacgtggaaaaaaagtatctcctccatcactaggaaaacccgcacacataaacctaaccgcgaagcaatatatatacagtgaacacacaataagctttgaatgttatagttttctaaaatgtataacaaatacagaaatcaattcgttcgatgagtatatattaagaggactattagaagctggtaatagtttacagatattttccaattccgtaggtaaacgaacagatactataggtgtactagggaataagtatccatttagcaaaattccattggcctcattaactcctaaagcacaacgagagatattttcagcgtggatttctcatagacctgtagttttaactggaggaactggagtgggtaagacgtcacaggtacccaagttattgctttggtttaattatttatttggtggattctctactctagataaaatcactgactttcacgaaagaccagtcattctatctcttcctaggatagctttagttagattgcatagcaataccattttaaaatcattgggatttaaggtactagatggatctcctatttctttacggtacggatctataccggaagaattaataaacaaacaaccaaaaaaatatggaattgtattttctacccataagttatctctaacaaaactatttagttatggcactcttattatagacgaagttcatgagcatgatcaaataggagatattattatagcagtagcgagaaagcatcatacgaaaatagattctatgtttttaatgactgccacgttagaggatgacagggaacggctaaaagtatttttacctaatcccgcatttatacatattcctggagatacactgtttaaaattagcgaggtatttattcataataagataaatccatcttccagaatggcatacatagaagaagaaaagagaaatttagttactgctatacagatgtatactcctcctgatggatcatccggtatagtctttgtggcatccgttgcacagtgtcacgaatataaatcatatttagaaaaaagattaccgtatgatatgtatattattcatggtaaggtcttagatatagacgaaatattagaaaaagtgtattcatcacctaatgtatcgataattatttctactccttatttggaatccagcgttactatacgcaatgttacacacatttatgatatgggtagagtttttgtccccgctccttttggaggatcgcaacaatttatttctaaatctatgagagatcaacgaaaaggaagagtaggaagagttaatcctggtacatacgtctatttctatgatctgtcttatatgaagtctatacagcgaatagattcagaatttctacataattatatattgtacgctaataagtttaatctaacactccccgaagatttgtttataatccctacaaatttggatattctatggcgtacaaaggaatatatagactcgttcgatattagtacagaaacatggaataaattattatccaattattatatgaagatgatagagtatgctaaactttatgtactaagtcctattctcgctgaggagttggataactttgagaggacgggagaattaactagtattgtacgagaagccattttatctctaaatttacaaattaagattttaaattttaaacataaagatgatgatacgtatatacacttttgtaaaatattattcggtgtctataacggaacaaacgctactatatattatcatagacctctaacgggatatatgaatatgatttcagatactatatttgttcctgtagataataactaaaaatcaaactctaatgaccacatctttttttagagatgaaaaattttccacatctccttttgtagacacgactaaacattttgcagaaaaaagtttattagtgtttagataatcgtatacttcatcagtgtagatagtaaatgtgaacagataaaaggtattcttgctcaatagattggtaaattccatagaatatattaatcctttcttcttgagatcccacatcatttcaaccagagacgttttatccaatgatttacctcgtactataccacatacaaaactagattttgcagtgacgtcgtacctggtattcctaccaaacaaaattttacttttagttcttttagaaaattctaaggtagaatctctatttgccaatatgtcatctatggaattaccactagcaaaaaatgatagaaatatatattgatacatcgcagctggttttgatctactatactttaaaaacgaatcagattccataattgcctgtatatcatcagctgaaaaactatgttttacacgtattccttcggcatttctttttaatgatatatcttgtttagacaatgataaagttatcatgtccatgagagacgcgtctccgtatcgtataaatatttcattagatgttagacgcttcattaggggtatacttctataaggtttcttaatcagtccatcattggttgcgtcaagaactactatcggatgttgttgggtatctctagtgttacacatggccttactaaagtttgggtaaataactatgatatctctattaattatagatgcatatatttcattcgtcaaggatattagtatcgacttgctatcgtcattaatacgtgtaatgtaatcatataaatcatgcgatagccaaggaaaatttaaatagatgttcatcatataatcgtcgctataattcatattaatacgttgacattgactaatttgtaatatagcctcgccacgaagaaagctctcgtattcagtttcatcgataaaggataccgttaaatataactggttgccgatagtctcatagtctattaagtggtaagtttcgtacaaatacagaatccctaaaatattatctaatgttggattaatctttaccataactgtataaaatggagacggagtcataactattttaccgtttgtacttactggaatagatgaaggaataatctccggacatgctggtaaagacccaaatgtctgtttgaagaaatccaatgttccaggtcctaatctcttaacaaaaattacgatattcgatcccgatatcctttgcattctatttaccagcatatcacgaactatattaagattatctatcatgtctattctcccaccgttatataaatcgcctccgctaagaaacgttagtatatccatacaatggaatacttcatttctaaaatagtattcgttttctaattctttaatgtgaaatcgtatactagaaagggaaaaattatctttgagttttccgttagaaaagaaccacgaaactaatgttctgattgcgtccgattccgttgctgaattaatggatttacaccaaaaactcatataacttctagatgtagaagcattcgctaaaaaattagtagaatcaaaggatataagtagatgttccaacaagtgagcaattcccaagatttcatctatatcattctcgaatccgaaattagaaattcccaagtagatatcctttttcatccgatcgttgatgaaaatacgaactttattcggtaagacaatcatttactaaggagtaaaataggaagtaatgttcgtatgtcgttatcatcgtataaattaaaggtgtgttttttaccattaagtgacattataattttaccaatattggaattataatataggtgtatttgcgcactcgcgacggttgatgcatcggtaaatatagctgtatctaatgttctagtcggtatttcatcatttcgctgtctaataatagcgttttctctatctgtttccattacagctgcctgaagtttattggtcggataatatgtaaaataataagaaatacatacgaataacaaaaataaaataagatataataaagatgccatttagagatctaattttgtttaacttgtccaaattcctacttacagaagatgaggaatcgttggagatagtgtcttccttatgtagaggatttgaaatatcttataatgacttgataacttactttccagataggaaataccataaatatatttataaagtatttgaacatgtagatttatcggaggaattaagtatggaattccatgatacaactctgagagatttagtctatcttagattgtacaagtattccaagtgtatacggccgtgttataaattaggagataatctaaaaggcatagttgttataaaggacaggaatatttatattagggaagcaaatgatgacttgatagaatatctcctcaaggaatacactcctcagatttatacatattctaatgagcgcgtccccataactggttcaaaattaattctttgtggattttctcaagttacatttatggcgtatacaacgtcgcatataacaacaaataaaaaggtagatgttctcgtttccaaaaaatgtatagatgaactagtcgatccaataaattatcaaatacttcaaaatttatttgataaaggaagcggaacaataaacaaaatactcaggaagatattttattcggtaacaggtggccaaactccataggtagctttttctatttcggattttagaatttccaaattcaccagcgatttatcggttttggtgaaatccaaggatttattaatgtccacaaatgccatttgttttgtctgtggattgtatttgaaaatggaaacgatgtagttagatagatgcgctgcgaagtttcctattagggttccgcgcttcacgtcacccagcatacttgaatcaccatcctttaaaaaaaatgataagatatcaacatggagtatatcatactcgaattttaattcttctactgactcactgacattttcacaaatactacaatacggtttaccgaaaataatcagtacgttcttcatttatgggtatcaaaaacttaaaatcgttactgctggaaaataaatcactgacgatattagatgataatttatacaaagtatacaatggaatatttgtggatacaatgagtatttatatagccgtcgccaattgtgtcagaaacttagaagagttaactacggtattcataaaatacgtaaacggatgggtaaaaaagggagggcatgtaaccctttttatcgatagaggaagtataaaaattaaacaagacgttagagacaagagacgtaaatattctaaattaaccaaggacagaaaaatgttagaattagaaaagtgtacatccgaaatacaaaatgttaccggatttatggaagaagaaataaaggcagaaatgcaattaaaaatcgataaactcacatttcaaatatatttatctgattctgataacataaaaatatcattgaatgagatactaacacatttcaacaataatgagaatgttacattattttattgtgatgaacgagacgcagaattcgttatgtgtctcgaggctaaaacacatttctctaccacaggagaatggccgttgataataagtaccgatcaggatactatgctatttgcatctgctgataatcatcctaagatgataaaaaacttaactcaactgtttaaatttgttccctcggcagaggataactatttagcaaaattaacggcgttagtgaatggatgtgatttctttcctggactctatggggcatctataacacccaccaacttaaacaaaatacaattgtttagtgattttacaatcgataatatagtcactagtttggcaattaaaaattattatagaaagactaactctaccgtagacgtgcgtaatattgttacgtttataaacgattacgctaatttagacgatgtctactcgtatattcctccttgtcaatgcactgttcaagaatttatattttccgcattagatgaaaaatggaatgaatttaaatcatcttatttagaaagcgtgccgttaccctgccaattaatgtacgcgttagaaccacgcaaggagattgatgtttcagaagttaaaactttatcatcttatatagatttcgaaaatactaaatcagatatcgatgttataaaatctatatcctcgatcttcggatattctaacgaaaactgtaacacgatagtattcggcatctataaggataatttactactgagtataaataattcattttactttaacgatagtctgttaataaccaatactaaaagtgataatataataaatataggttactagattaaaaatggtgttccaactcgtgtgctctacatgcggtaaagatatttctcacgaacgatataaattgattatacgaaaaaaatcattaaaggatgtactcgtcagtgtaaagaacgaatgttgtaggttaaaattatctacacaaatagaacctcaacgtaacttaacagtgcaacctctattggatataaactaatatggatccggttaattttatcaagacatatgcgcctagaggttctattatttttattaattataccatgtcattaacaagtcatttgaatccatcgatagaaaaacatgtgggtatttattatggtacgttattatcggaacacttggtagttgaatctacctatagaaaaggagttcgaatagtcccattggatagtttttttgaaggatatcttagtgcaaaagtatacatgttagagaatattcaagttatgaaaatagcagctgatacgtcattaactttattgggtattccgtatggatttggtcatgatagaatgtattgttttaaattggtagctgactgttataaaaatgccggtattgatacatcgtctaaacgaatattgggcaaagatatttttctgagccaaaacttcacagacgataatagatggataaagatatatgattctaataatttaacattttggcaaattgattaccttaaagggtgagttaatatgcataactactcctccgttgttttttccctcgttctttttcttaacgttgtttgccatcactctcataatgtaaagatattctaaaatggtaaacttttgcatatcggacgcagaaattggtataaatgttgtaattgtattatttcccgtcaatggactagtcacagctccatcagttttatatcctttagagtatttctcactcgtgtctaacattctagagcattccatgatctgtttatcgttgatattggccggaaagatagattttttattttttattatattactattggcaattgtagatataacttctggtaaatatttttctaccttttcaatctcttctattttcaagccggctatatattctgctatattgttgctagtatcaataccttttctggctaagaagtcatatgtggtattcactatatcagttttaactggtagttccattagcctttccacttctgcagaataatcagaaattggttctttaccagaaaatccagctactataataggctcaccgatgatcattggcaaaatcctatattgtaccagattaatgagagcatatttcatttccaataattctgctagttcttgagacattgatttatttgatgaatctagttggttctctagatactctaccatttctgccgcatacaataacttgttagataaaatcagggttatcaaagtgtttagcgtggctagaatagtgggcttgcatgtattaaagaatgcggtagtatgagtaaaccgttttaacgaattatatagtctccagaaatctgtggcgttacatacatgagccgaatgacatcgaagattgtccaatatttttaatagctgctctttgtccattatttctatatttgactcgcaacaattgtagataccattaatcaccgattcctttttcgatgccggacaatagcacaattgtttagctttggactctatgtattcagaattaatagatatatctctcaatacagattgcactatacattttgaaactatgtcaaaaattgtagaacgacgctgttctgcagccatttaactttaaataatttacaaaaatttaaaatgagcatccgtataaaaatcgataaactgcgccaaattgtggcatatttttcagagttcagtgaagaagtgtctataaatgtagactcgacggatgagttaatgtatatttttgccgccttgggcggatctgtaaacatttgggcaattatacctctaagtgcatcagtgttttaccgaggagccgaaaatattgtgtttaatcttcctgtgtccaaggtaaaatcgtgtttgtgtagttttcacaatgatgccatcatagatatagaacctgatctggaaaataatctagtaaaactttctagttatcatgtagtaagtgtcgattgtaacaaggaactgatgcctattaggacagatactactatttgtctaagtatagatcaaaagaaatcttacgtgtttaattttcacaagtatgaagaaaaatgttgtggtagaaccgtcattcatctagaatggttgttgggctttatcaagtgtattagtcagcatcagcatctggctattatgtttaaagatgacaatattattatgaagactcctggtaatactgatgcgttttccagggaatattctatgactgaatgttctcaagaactacaaaagttttctttcaaaatagctatctcgtctctcaacaaactacgaggattcaaaaagagagtcaatgtttttgaaactagaatcgtaatggataatgacgataacattttaggaatgttgttttcggatagagttcaatcctttaagatcaacatctttatggcgtttttagattaatactttcaatgagataaatatgggtggcggagtaagtgttgagctccctaaacgggatccgcctccgggagtacccactgatgagatgttattaaacgtggataaaatgcatgacgtgatagctcccgctaagcttttagaatatgtgcatataggaccactagcaaaagataaagaggataaagtaaagaaaagatatccagagtttagattagtcaacacaggacccggtggtctttcggcattgttaagacaatcgtataatggaaccgcacccaattgctgtcgcacttttaatcgtactcattattggaagaaggatggaaagatatcagataagtatgaagagggtgcagtattagaatcgtgttggccagacgttcacgacactggaaaatgcgatgttgatttattcgactggtgtcagggggatacgttcgatagaaacatatgccatcagtggatcggttcagcctttaataggagtaatagaactgtagagggtcaacaatcgttaataaatctgtataataagatgcaaacattatgtagtaaagatgctagtgtaccaatatgcgaatcatttttgcattatttacgcgcacacaatacagaagatagcaaagagatgatcgattatattctaagacaacagtctgcggactttaaacagaaatatatgagatgtagttatcccactagagataagttagaagagtcattaaaatatgcggaacctcgagaatgttgggatccagagtgttcgaatgccaatgttaatttcttactaacacgtaattataataatttaggactttgcaatattgtacgatgtaataccagcgtgaacaacttacagatggataaaacttcctcattaagattgtcatgtggattaagcaatagtgatagattttctactgttcccgtcaatagagcaaaagtagttcaacataatattaaacactcgttcgacctaaaattgcatttgatcagtttattatctctcttggtaatatggatactaattgtagctatttaaatgggtgccgcggcaagcatacagacgacggtgaatacactcagcgaacgtatctcgtctaaattagaacaagaagcgaacgctagtgctcaaacaaaatgtgatatagaaatcggaaatttttatatccgacaaaaccatggatgtaacctcactgttaaaaatatgtgctctgcggacgcggatgctcagttggatgctgtgttatcagccgctacagaaacatatagtggattaacaccggaacaaaaagcatacgtgccagctatgtttactgctgcgttaaacattcagacgagtgtaaacactgttgttagagattttgaaaattatgtgaaacagacttgtaattctagcgcggtcgtcgataacaaattaaagatacaaaacgtaatcatagatgaatgttacggagccccaggatctccaacaaatttggaatttattaatacaggatctagcaaaggaaattgtgccattaaagcgttgatgcaattgacgactaaggccactactcaaatagcacctagacaagttgctggtacaggagttcagttttatatgattgttatcggtgttataatattggcagcgttgtttatgtactatgccaagcgtatgttgttcacatccaccaatgataaaatcaaacttattttagccaataaggaaaacgtccattggactacttacatggacacattctttagaacttctccgatggttattgctaccacggatatgcaaaactgaaaatatattgataatattttaatagattaacatggaagttatcgctgatcgtctagacgatatagtgaaacaaaatatagcggatgaaaaatttgtagattttgttatacacggtctagagcatcaatgtcctgctatacttcgaccattaattaggttgtttattgatatactattatttgttatagtaatttatatttttacggtacgtctagtaagtagaaattatcaaatgttgttggtggtgctagtcatcacattaactattttttattactttatactataatagtactagactgacttctaacaaacatctcacctgccataaataaatgcttgatattaaagtcttctatttctaacactattccatctgtggaaaataatactctgacattatcgctaattgacacatcggtgagtgatatgcctataaagtaataatcttctttgggcacatataccagtgtaccaggttctaacaacctatttactggtgctcctgtagcatactttttctttaccttgagaatatccatcgtttgcttggtcaatagcgatatgtgattttttatcaaccactcaaaaaagtaattggagtgttcatatcctctacgggctattgtctcatggccgtgtatgaaatttaagtaacacgactgtggtagatttgttctatagagccgattgccgcaaatagatagaactaccaatatgtctgtacaaatgttaaacattaattgattaacagaaaaaacaatgttcgttctgggaatagaaaccagatcaaaacaaaattcgttagaatatatgccacgtttatacatggaatataaaataactacagtttgaaaaataacagtatcatttaaacatttaacttgcggggttaatctcacaactttactgtttttgaactgttcaaaatatagcatcgatccgtgagaaatacgtttagccgcctttaatagaggaaatcccaccgcctttctggatctcaccaacgacgatagttctgaccagcaactcatttcttcatcatccacctgttttaacatataataggcaggagatagatatccgtcattgcaatattccttctcgtaggcacacaatctaatattgataaaatctccattctcttctctgcatttattatcttgtctcggtggctgattaggctgtggtcttggtttaggccttggtctatcgttgttgaatctattttggtcattaaatctttcatttcttcctggtatatttctatcacctcgtttggttggatttttgtctatattatcgtttgtaacatcggtacgggtattcatttatcacaaaaaaaacttctctaaatgagtctactgctagaaaacctcatcgaagaagataccatattttttgcaggaagtatatctgagtatgatgatttacaaatggttattgccggcgcaaaatccaaatttccaagatctatgctttctatttttaatatagtacctagaacgatgtcaaaatatgagttggagttgattcataacgaaaatatcacaggagcaatgtttaccacaatgtataatataagaaacaatttgggtctaggagatgataaactaactattgaagccattgaaaactatttcttggatcctaacaatgaagttatgcctcttattattaataatacggatatgactgccgtcattcctaaaaaaagtggtaggagaaagaataagaacatggttatcttccgtcaaggatcatcacctatcttgtgcattttcgaaactcgtaaaaagattaatatttataaagaaaatatggaatccgcgtcgactgagtatacacctatcggagacaacaaggctttgatatctaaatatgcgggaattaatgtcctgaatgtgtattctccttccacatccataagattgaatgccatttacggattcaccaataaaaataaactagagaaacttagtactaataaggaactagaatcgtatagttctagccctcttcaagaacccattaggttaaatgattttctgggactattggaatgtgttaaaaagaatattcctctaacagatattccgacaaaggattgattactataaatggagaatgttcctaatgtatactttaatcctgtgtttatagagcccacgtttaaacattctttattaagtgtttataaacacagattaatagttttatttgaagtattcgttgtattcattctaatatatgtattttttagatctgaattaaatatgttcttcatgcctaaacgaaaaatacccgatcctattgatagattacgacgtgctaatctagcgtgtgaagacgataaattaatgatctatggattaccatggatgacaactcaaacatctgcgttatcaataaatagtaaaccgatagtgtataaagattgtgcaaagcttttgcgatcaataaatggatcacaaccagtatctcttaacgatgttcttcgcagatgatgattcattttttaagtatttggctagtcaagatgatgaatcttcattatctgatatattgcaaatcactcaatatctagactttctgttattattattgatccaatcaaaaaataaattagaagctgtgggtcattgttatgaatctctttcagaggaatacagacaattgacaaaattcacagactttcaagattttaaaaaactgtttaacaaggtccctattgttacagatggaagggtcaaacttaataaaggatatttgttcgactttgtgattagtttgatgcgattcaaaaaagaatcctctctagctaccaccgcaatagatcctgttagatacatagatcctcgtcgcaatatcgcattttctaacgtgatggatatattaaagtcgaataaagtgaacaataattaattctttattgtcatcatgaacggcggacatattcagttgataatcggccccatgttttcaggtaaaagtacagaattaattagacgagttagacgttatcaaatagctcaatataaatgcgtgactataaaatattctaacgataatagatacggaacgggactatggacgcatgataagaataattttgaagcattggaagcaactaaactatgtgatgtcttggaatcaattacagatttctccgtgataggtatcgatgaaggacagttctttccagacattgttgaattagatcgataaaaattaattaattacccgggtaccaggcctagatctgtcgagatccggtggtggtgcaaatcaaagaactgctcctcagtggatgttgcctttacttctaggcctgtacggaagtgttacttctgctctaaaagctgctgcagggggggggggggggtgggggggccggttagggccgccatcccctcagagcgtcgggatatcgggtggcggctcgggacggaggacgcgctagtgttcttctgtgtggcagttcagaatgatggatcaagctagatcagcattctctaacttgtttggtggagaaccattgtcatatacccggttcagcctggctcggcaagtagatggcgataacagtcatgtggagatgaaacttgctgtagatgaagaagaaaatgctgacaataacacaaaggccaatgtcacaaaaccaaaaaggtgtagtggaagtatctgctatgggactattgctgtgatcgtctttttcttgattggatttatgattggctacttgggctattgtaaaggggtagaaccaaaaactgagtgtgagagactggcaggaaccgagtctccagtgagggaggagccaggagaggacttccctgcagcacgtcgcttatattgggatgacctgaagagaaagttgtcggagaaactggacagcacagacttcaccagcaccatcaagctgctgaatgaaaattcatatgtccctcgtgaggctggatctcaaaaagatgaaaatcttgcgttgtatgttgaaaatcaatttcgtgaatttaaactcagcaaagtctggcgtgatcaacattttgttaagattcaggtcaaagacagcgctcaaaactcggtgatcatagttgataagaacggtagacttgtttacctggtggagaatcctgggggttatgtggcgtatagtaaggctgcaacagttactggtaaactggtccatgctaattttggtactaaaaaagattttgaggatttatacactcctgtgaatggatctatagtgattgtcagagcagggaaaatcacctttgcagaaaaggttgcaaatgctgaaagcttaaatgcaattggtgtgttgatatacatggaccagactaaatttcccattgttaacgcagaactttcattctttggacatgctcatctggggacaggtgacccttacacacctggattcccttccttcaatcacactcagtttccaccatctcggtcatcaggattgcctaatatacctgtccagacaatctccagagctgctgcagaaaagctgtttgggaatatggaaggagactgtccctctgactggaaaacagactctacatgtaggatggtaacctcagaaagcaagaatgtgaagctcactgtgagcaatgtgctgaaagagataaaaattcttaacatctttggagttattaaaggctttgtagaaccagatcactatgttgtagttggggcccagagagatgcatggggccctggagctgcaaaatccggtgtaggcacagctctcctattgaaacttgcccagatgttctcagatatggtcttaaaagatgggtttcagcccagcagaagcattatctttgccagttggagtgctggagactttggatcggttggtgccactgaatggctagagggatacctttcgtccctgcatttaaaggctttcacttatattaatctggataaagcggttcttggtaccagcaacttcaaggtttctgccagcccactgttgtatacgcttattgagaaaacaatgcaaaatgtgaagcatccggttactgggcaatttctatatcaggacagcaactgggccagcaaagttgagaaactcactttagacaatgctgctttccctttccttgcatattctggaatcccagcagtttctttctgtttttgcgaggacacagattatccttatttgggtaccaccatggacacctataaggaactgattgagaggattcctgagttgaacaaagtggcacgagcagctgcagaggtcgctggtcagttcgtgattaaactaacccatgatgttgaattgaacctggactatgagaggtacaacagccaactgctttcatttgtgagggatctgaaccaatacagagcagacataaaggaaatgggcctgagtttacagtggctgtattctgctcgtggagacttcttccgtgctacttccagactaacaacagatttcgggaatgctgagaaaacagacagatttgtcatgaagaaactcaatgatcgtgtcatgagagtggagtatcacttcctctctccctacgtatctccaaaagagtctcctttccgacatgtcttctggggctccggctctcacacgctgccagctttactggagaacttgaaactgcgtaaacaaaataacggtgcttttaatgaaacgctgttcagaaaccagttggctctagctacttggactattcagggagctgcaaatgccctctctggtgacgtttgggacattgacaatgagttttaaatgtgatacccatagcttccatgagaacagcagggtagtctggtttctagacttgtgctgatcgtgctaaattttcagtagggctacaaaacctgatgttaaaattccatcccatcatcttggtactactagatgtctttaggcagcagcttttaatacagggtagataacctgtacttcaagttaaagtgaataaccacttaaaaaatgtccatgatggaatattcccctatctctagaattttaagtgctttgtaatgggaactgcctctttcctgttgttgttaatgaaaatgtcagaaaccagttatgtgaatgatctctctgaatcctaagggctggtctctgctgaaggttgtaagtggtcgcttactttgagtgatcctccaacttcatttgatgctaaataggagataccaggttgaaagaccttctccaaatgagatctaagcctttccataaggaatgtagctggtttcctcattcctgaaagaaacagttaactttcagaagagatgggcttgttttcttgccaatgaggtctgaaatggaggtccttctgctggataaaatgaggttcaactgttgattgcaggaataaggccttaatatgttaacctcagtgtcatttatgaaaagaggggaccagaagccaaagacttagtatattttcttttcctctgtcccttcccccataagcctccatttagttctttgttatttttgtttcttccaaagcacattgaaagagaaccagtttcaggtgtttagttgcagactcagtttgtcagactttaaagaataatatgctgccaaattttggccaaagtgttaatcttaggggagagctttctgtccttttggcactgagatatttattgtttatttatcagtgacagagttcactataaatggtgtttttttaatagaatataattatcggaagcagtgccttccataattatgacagttatactgtcggttttttttaaataaaagcagcatctgctaataaaacccaacagatactggaagttttgcatttatggtcaacacttaagggttttagaaaacagccgtcagccaaatgtaattgaataaagttgaagctaagatttagagatgaattaaatttaattaggggttgctaagaagcgagcactgaccagataagaatgctggttttcctaaatgcagtgaattgtgaccaagttataaatcaatgtcacttaaaggctgtggtagtactcctgcaaaattttatagctcagtttatccaaggtgtaactctaattcccattttgcaaaatttccagtacctttgtcacaatcctaacacattatcgggagcagtatcttccataatgtataaagaacaaggtagtttttacctaccacagtgtctgtatcggagacagtgatctccatatgttacactaagggtgtaagtaattatcgggaacagtgtttcccataattttcttcatgcaatgacatcttcaaagcttgaagatcgttagtatctaacatgtatcccaactcctataattccctatcttttagttttagttgcagaaacattttgtggtcattaagcattgggtgggtaaattcaaccactgtaaaatgaaattactacaaaatttgaaatttagcttgggtttttgttacctttatggtttctccaggtcctctacttaatgagatagtagcatacatttataatgtttgctattgacaagtcattttaactttatcacattatttgcatgttacctcctataaacttagtgcggacaagttttaatccagaattgaccttttgacttaaagcagagggactttgtatagaaggtttgggggctgtggggaaggagagtcccctgaaggtctgacacgtctgcctacccattcgtggtgatcaattaaatgtaggtatgaataagttcgaagctccgtgagtgaaccatcattataaacgtgatgatcagctgtttgtcatagggcagttggaaacggcctcctagggaaaagttcatagggtctcttcaggttcttagtgtcacttacctagatttacagcctcacttgaatgtgtcactactcacagtctctttaatcttcagttttatctttaatctcctcttttatcttggactgacatttagcgtagctaagtgaaaaggtcatagctgagattcctggttcgggtgttacgcacacgtacttaaatgaaagcatgtggcatgttcatcgtataacacaatatgaatacagggcatgcattttgcagcagtgagtctcttcagaaaacccttttctacagttagggttgagttacttcctatcaagccagtacgtgctaacaggctcaatattcctgaatgaaatatcagactagtgacaagctcctggtcttgagatgtcttctcgttaaggagatgggccttttggaggtaaaggataaaatgaatgagttctgtcatgattcactattctagaacttgcatgacctttactgtgttagctctttgaatgttcttgaaattttagactttctttgtaaacaaatgatatgtccttatcattgtataaaagctgttatgtgcaacagtgtggagattccttgtctgatttaataaaatacttaaacactgaaaaaaaaaaaaaaaaaaaaaaaaaaaaaaaaaaaaaaaaaaaaaaaaaaaaaaaaaaaaaaaaaaaaaaaaaaaaaaaaagtaccttctgaggcggaaagaaccagccggatctcgacttcgagcttatttatattccaaaaaaaaaaaataaaatttcaatttttaagctttcactaattccaaacccacccgctttttatagtaagtttttcacccataaataataaatacaataattaatttctcgtaaaagtagaaaatatattctaatttattgcacggtaaggaagtagatcataactcgagcatgggagatcccgtcgttttacaacgtcgtgactgggaaaaccctggcgttacccaacttaatcgccttgcagcacatccccctttcgccagctggcgtaatagcgaagaggcccgcaccgatcgcccttcccaacagttgcgcagcctgaatggcgaatggcgctttgcctggtttccggcaccagaagcggtgccggaaagctggctggagtgcgatcttcctgaggccgatactgtcgtcgtcccctcaaactggcagatgcacggttacgatgcgcccatctacaccaacgtgacctatcccattacggtcaatccgccgtttgttcccacggagaatccgacgggttgttactcgctcacatttaatgttgatgaaagctggctacaggaaggccagacgcgaattatttttgatggcgttaactcggcgtttcatctgtggtgcaacgggcgctgggtcggttacggccaggacagtcgtttgccgtctgaatttgacctgagcgcatttttacgcgccggagaaaaccgcctcgcggtgatggtgctgcgctggagtgacggcagttatctggaagatcaggatatgtggcggatgagcggcattttccgtgacgtctcgttgctgcataaaccgactacacaaatcagcgatttccatgttgccactcgctttaatgatgatttcagccgcgctgtactggaggctgaagttcagatgtgcggcgagttgcgtgactacctacgggtaacagtttctttatggcagggtgaaacgcaggtcgccagcggcaccgcgcctttcggcggtgaaattatcgatgagcgtggtggttatgccgatcgcgtcacactacgtctgaacgtcgaaaacccgaaactgtggagcgccgaaatcccgaatctctatcgtgcggtggttgaactgcacaccgccgacggcacgctgattgaagcagaagcctgcgatgtcggtttccgcgaggtgcggattgaaaatggtctgctgctgctgaacggcaagccgttgctgattcgaggcgttaaccgtcacgagcatcatcctctgcatggtcaggtcatggatgagcagacgatggtgcaggatatcctgctgatgaagcagaacaactttaacgccgtgcgctgttcgcattatccgaaccatccgctgtggtacacgctgtgcgaccgctacggcctgtatgtggtggatgaagccaatattgaaacccacggcatggtgccaatgaatcgtctgaccgatgatccgcgctggctaccggcgatgagcgaacgcgtaacgcgaatggtgcagcgcgatcgtaatcacccgagtgtgatcatctggtcgctggggaatgaatcaggccacggcgctaatcacgacgcgctgtatcgctggatcaaatctgtcgatccttcccgcccggtgcagtatgaaggcggcggagccgacaccacggccaccgatattatttgcccgatgtacgcgcgcgtggatgaagaccagcccttcccggctgtgccgaaatggtccatcaaaaaatggctttcgctacctggagagacgcgcccgctgatcctttgcgaatacgcccacgcgatgggtaacagtcttggcggtttcgctaaatactggcaggcgtttcgtcagtatccccgtttacagggcggcttcgtctgggactgggtggatcagtcgctgattaaatatgatgaaaacggcaacccgtggtcggcttacggcggtgattttggcgatacgccgaacgatcgccagttctgtatgaacggtctggtctttgccgaccgcacgccgcatccagcgctgacggaagcaaaacaccagcagcagtttttccagttccgtttatccgggcaaaccatcgaagtgaccagcgaatacctgttccgtcatagcgataacgagctcctgcactggatggtggcgctggatggtaagccgctggcaagcggtgaagtgcctctggatgtcgctccacaaggtaaacagttgattgaactgcctgaactaccgcagccggagagcgccgggcaactctggctcacagtacgcgtagtgcaaccgaacgcgaccgcatggtcagaagccgggcacatcagcgcctggcagcagtggcgtctggcggaaaacctcagtgtgacgctccccgccgcgtcccacgccatcccgcatctgaccaccagcgaaatggatttttgcatcgagctgggtaataagcgttggcaatttaaccgccagtcaggctttctttcacagatgtggattggcgataaaaaacaactgctgacgccgctgcgcgatcagttcacccgtgcaccgctggataacgacattggcgtaagtgaagcgacccgcattgaccctaacgcctgggtcgaacgctggaaggcggcgggccattaccaggccgaagcagcgttgttgcagtgcacggcagatacacttgctgatgcggtgctgattacgaccgctcacgcgtggcagcatcaggggaaaaccttatttatcagccggaaaacctaccggattgatggtagtggtcaaatggcgattaccgttgatgttgaagtggcgagcgatacaccgcatccggcgcggattggcctgaactgccagctggcgcaggtagcagagcgggtaaactggctcggattagggccgcaagaaaactatcccgaccgccttactgccgcctgttttgaccgctgggatctgccattgtcagacatgtataccccgtacgtcttcccgagcgaaaacggtctgcgctgcgggacgcgcgaattgaattatggcccacaccagtggcgcggcgacttccagttcaacatcagccgctacagtcaacagcaactgatggaaaccagccatcgccatctgctgcacgcggaagaaggcacatggctgaatatcgacggtttccatatggggattggtggcgacgactcctggagcccgtcagtatcggcggaattccagctgagcgccggtcgctaccattaccagttggtctggtgtcaaaaataataataaccgggcaggggggatccaattctgtgagcgtatggcaaacgaaggaaaaatagttatagtagccgcactcgatgggacatttcaacgtaaaccgtttaataatattttgaatcttattccattatctgaaatggtggtaaaactaactgctgtgtgtatgaaatgctttaaggaggcttccttttctaaacgattgggtgaggaaaccgagatagaaataataggaggtaatgatatgtatcaatcggtgtgtagaaagtgttacatcgactcataatattatattttttatctaaaaaactaaaaataaacattgattaaattttaatataatacttaaaaatggatgttgtgtcgttagataaaccgtttatgtattttgaggaaattgataatgagttagattacgaaccagaaagtgcaaatgaggtcgcaaaaaaactgccgtatcaaggacagttaaaactattactaggagaattattttttcttagtaagttacagcgacacggtatattagatggtgccaccgtagtgtatataggatctgctcccggtacacatatacgttatttgagagatcatttctataatttaggagtgatcatcaaatggatgctaattgacggccgccatcatgatcctattttaaatggattgcgtgatgtgactctagtgactcggttcgttgatgaggaatatctacgatccatcaaaaaacaactgcatccttctaagattattttaatttctgatgtgagatccaaacgaggaggaaatgaacctagtacggcggatttactaagtaattacgctctacaaaatgtcatgattagtattttaaaccccgtggcgtctagtcttaaatggagatgcccgtttccagatcaatggatcaaggacttttatatcccacacggtaataaaatgttacaaccttttgctccttcatattcagctgaaatgagattattaagtatttataccggtgagaacatgagactgactcgagttaccaaattagacgctgtaaattatgaaaaaaagatgtactaccttaataagatcgtccgtaacaaagtagttgttaactttgattatcctaatcaggaatatgactattttcacatgtactttatgctgaggaccgtgtactgcaataaaacatttcctactactaaagcaaaggtactatttctacaacaatctatatttcgtttcttaaatattccaacaacatcaactgaaaaagttagtcatgaaccaatacaacgtaaaatatctagcaaaaattctatgtctaaaaacagaaatagcaagagatccgtacgcggtaataaatagaaacgtactactgagatatactaccgatatagagtataatgatttagttactttaataaccgttagacataaaattgattctatgaaaactgtgtttcaggtatttaacgaatcatccataaattatactccggttgatgatgattatggagaaccaatcattataacatcgtatcttcaaaaaggtcataacaagtttcctgtaaattttctatacatagatgtggtaatatctgacttatttcctagctttgttagactagatactacagaaactaatatagttaatagtgtactacaaacaggcgatggtaaaaagactcttcgtcttcccaaaatgttagagacggaaatagttgtcaagattctctatcgccctaatataccattaaaaattgttagatttttccgcaataacatggtaactggagtagagatagccgatagatctgttatttcagtcgctgattaatcaattagtagagatgagataagaacattataataatcaataatatatcttatatcttatatcttatatcttatatcttgtttagaaaaatgctaatattaaaatagctaacgctagtaatccaatcggaagccatttgatatctataatagggtatctaatttcctgatttaaatagcggacagctatattctcggtagctactcgtttggaatcacaaacattatttacatctaatttactatctgtaatggaaacgtttcccaatgaaatggtacaatccgatacattgcattttgttatatttttttttaaagaggctggtaacaacgcatcgcttcgtttacatggctcgtaccaacaataatagggtaatcttgtatctattcctatccgtactatgcttttatcaggataaatacatttacatcgtatatcgtctttgttagcatcacagaatgcataaatttgttcgtccgtcatgataaaaatttaaagtgtaaatataactattatttttatagttgtaataaaaagggaaatttgattgtatactttcggttctttaaaagaaactgacttgataaaaatggctgtaatctctaaggttacgtatagtctatatgatcaaaaagagattaatgctacagatattatcattagtcatgttaaaaatgacgacgatatcggtaccgttaaagatggtagactaggtgctatggatggggcattatgtaagacttgtgggaaaacggaattggaatgtttcggtcactggggtaaagtaagtatttataaaactcatatagttaagcctgaatttatttcagaaattattcgtttactgaatcatatatgtattcactgcggattattgcgttcacgagaaccgtattccgacgatattaacctaaaagagttatcgggacacgctcttaggagattaaaggataaaatattatccaagaaaaagtcatgttggaacagtgaatgtatgcaaccgtatcaaaaaattactttttcaaagaaaaaggtttgtttcgtcaacaagttggatgatattaacgttcctaattctctcatctatcaaaagttaatttctattcatgaaaagttttggccattattagaaattcatcaatatccagctaacttattttatacagactactttcccatccctccgttgattattagaccggctattagtttttggatagatagtatacccaaagagaccaatgaattaacttacttattaggtatgatcgttaagaattgtaacttgaatgctgatgaacaggttatccagaaggcggtaatagaatacgatgatattaaaattatttctaataacactaccagtatcaatttatcatatattacatccggcaaaaataatatgattagaagttatatcgtcgcccgacgaaaagatcagaccgctagatctgtaattggtcccagtacatctatcaccgttaatgaggtaggaatgcccgcatatattagaaatacacttacagaaaagatatttgttaatgcctttacagtggataaagttaaacaactattagcgtcaaaccaagttaaattttactttaataaacgattaaaccaattaacaagaatacgccaaggaaagtttattaaaaataaaatacatttattgcctggtgattgggtagaagtagctgttcaagaatatacaagtattatttttggaagacagccgtctctacatagatacaacgtcatcgcttcatctatcagagctaccgaaggagatactatcaaaatatctcccggaattgccaactctcaaaatgctgatttcgacggggatgaggaatggatgatattagaacaaaatcctaaagctgtaattgaacaaagtattcttatgtatccgacgacgttactcaaacacgatattcatggagcccccgtttatggatctattcaagatgaaatcgtagcagcgtattcattgtttaggatacaagatctttgtttagatgaagtattgaacatcttggggaaatatggaagagagttcgatcctaaaggtaaatgtaaattcagcggtaaagatatctatacttacttgataggtgaaaagattaattatccgggtctcttaaaggatggtgaaattattgcaaacgacgtagatagtaattttgttgtggctatgaggcatctgtcattggctggactcttatccgatcataagtcgaacgtggaaggtatcaactttattatcaagtcatcttatgtttttaagagatatctatctatttacggttttggggtgacattcaaagatctgagaccaaattcgacgttcactaataaattggaggccatcaacgtagaaaaaatagaacttatcaaagaagcatacgccaaatatctcaacgatgtaagagacgggaaaatagttccattatctaaagctttagaggcggactatgtggaatccatgttatccaacttgacaaatcttaatatccgagagatagaagaacatatgagacaaacgctgatagatgatccagataataacctcctgaaaatggccaaagcgggttataaagtaaatcccacagaactaatgtatattctaggtacgtatggacaacaaaggattgatggtgaaccagcagagactcgagtattgggtagagttttaccttactatcttccagactctaaggatccagaaggaagaggttacattcttaattctttaacaaaaggattaacgggttctcaatattacttttcgatgctggttgccagatctcaatctactgatatcgtctgtgaaacatcacgtaccggaacactggctagaaaaatcattaaaaagatggaggatatggtggtcgacggatacggacaagtagttataggtaatacgctcatcaagtacgccgccaattataccaaaattctaggctcagtatgtaaacctgtagatcttatctatccagatgagtccatgacttggtatttggaaattagtgctctgtggaataaaataaaacagggattcgtttactctcagaaacagaaacttgcaaagaagacattggcgccgtttaatttcctagtattcgtcaaacccaccactgaggataatgctattaaggttaaggatctgtacgatatgattcataacgtcattgatgatgtgagagagaaatacttctttacggtatctaatatagattttatggagtatatattcttgacgcatcttaatccttctagaattagaattacaaaagaaacggctatcactatctttgaaaagttctatgaaaaactcaattatactctaggtggtggaactcctattggaattatttctgcacaggtattgtctgagaagtttacacaacaagccctgtccagttttcacactactgaaaaaagtggtgccgtcaaacaaaaacttggtttcaacgagtttaataacttgactaatttgagtaagaataagaccgaaattatcactctggtatccgatgatatctctaaacttcaatctgttaagattaatttcgaatttgtatgtttgggagaattaaatccaaacatcactcttcgaaaagaaacagataaatatgtagtagatataatagtcaatagattatacatcaagagagcagaaataaccgaattagtcgtcgaatatatgattgaacgatttatctcctttagcgtcattgtaaaggaatggggtatggagacattcattgaggacgaggataatattagatttactgtctacctaaatttcgttgaaccggaagaattgaatcttagtaagtttatgatggttcttccgggggcagccaacaagggaaagattagtaaattcaagattcctatctctgattatacgggatatgacgacttcaatcaaacaaaaaagctcaataagatgactgtagaactcatgaatctaaaagaattgggttctttcgatttggaaaacgtcaacgtgtatcctggagtatggaatacatacgatatcttcggtatcgaggccgctcgtgaatacttgtgcgaagccatgttaaacacctatggagaagggttcgattatctgtatcagccttgtgatcttctcgctagtttactatgtgctagttacgaaccagaatcagtgaataaattcaagttcggcgcagctagtactcttaagagagctacgttcggagacaataaagcattgttaaacgcggctcttcataaaaagtcagaacctattaacgataatagtagctgccacttttttagcaaggtccctaatataggaactggatattacaaatactttatcgacttgggtcttctcatgagaatggaaaggaaactatctgataagatatcttctcaaaagatcaaggaaatggaagaaacagaagacttttaattcttatcaataacatatttttctatgatctgtcttttaaacgatggattttccacaaatgcgcctctcaagtccctcatagaatgatacacgtataaaaaatatagcataggcaatgactccttatttttagacattagatatgccaaaatcatagccccgcttctatttactcccgcagcacaatgaaccaacacgggctcgtttcgttgatcacatttagataaaaaggcggttacgtcgtcaaaatatttactaatatcggtagttgtatcatctaccaacggtatatgaataatattaatattagagttaggtaatgtatatttatccatcgtcaaatttaaaacatatttgaacttaacttcagatgatggtgcatccatagcatttttataatttcccaaatacacattattggttacccttgtcattatagtgggagatttggctttgtgcatatctccagttgaacgtagtagtaagtatttatacaaacttttcttatccatttataacgtacaaatggataaaactactttatcggtaaacgcgtgtaatttagaatacgttagagaaaaggctatagtaggcgtacaagcagccaaaacatcaacacttatattctttgttattatattggcaattagtgcgctattactctggtttcagacgtctgataatccagtctttaatgaattaacgagatatatgcgaattaaaaatacggttaacgattggaaatcattaacggatagcaaaacaaaattagaaagtgatagaggtagacttctagccgctggtaaggatgatatatttgaattcaaatgtgtggatttcggcgcctattttatagctatgcgattggataagaaaacatatctgccgcaagctattaggcgaggtactggagacgcgtggatggttaaaaaggcggcaaaggtcgatccatctgctcaacaattttgtcagtatttgataaaacacaagtctaataatgttattacttgtggtaatgagatgttaaatgaattaggttatagcggttattttatgtcaccgcattggtgttccgattttagtaatatggaatagtgttagataaatgcggtaacgaatgttcctgtaaggaaccataacagcttagatttaacgttaaagatgagcataaacataataaacaaaattacaatcaaacttataacattaatatcaaacaatccaaaaaatgaaatcagtggagtagtaaacgcgtacataactcctggataacgtttagcagctgccgttcctattctagaccaaaaattcggtttcatgttttcgaaacggtattctgcaacaagtcgaggatcgtgttctacatatttggcggcattatccagtatctgcctattgatcttcatttcgttttcgattctggctatttcaaaataaaatcccgatgatagacctccagactttataatttcatctacgatgttcagcgccgtagtaactctaataatataggctgataagctaacatcataccctcctgtatatgtgaatatggcatgatttttgtccattacaagctcggttttaactttattgcctgtaataatttctctcatctgtaggatatctatttttttgtcatgcattgccttcaagacgggacgaagaaacgtaatatcctcaataacgttatcgttttctacaataactacatattctacctttttattttctaactcggtaaaaaaattagaatcccatagggctaaatgtctagcgatatttcttttcgtttcctctgtacacatagtgttacaaaaccctgaaaagaagtgagtatacttgtcatcatttctaatgtttcctccagtccactgtataaacgcataatccttgtaatgatctggatcatccttgactaccacaacatttcttttttctggcataacttcgttgtcctttacatcatcgaacttctgatcattaatatgctcatgaacattaggaaatgtttctgatggaggtctatcaataactggcacaacaataacaggagttttcaccgccgccatttagttattgaaattaatcatatacaactctttaatacgagttatattttcgtctatccattgtttcacattgacatatttcgacaaaaagatataaaatgcgtattccaatgcttctctgtttaatgaattactaaaatatacaaacacgtcactgtctggcaataaatgatatcttagaatattgtaacaatttattttgtattgcacatgttcgtgatctatgagttcttcttcgaatggcataggatctccgaatctgaaaacgtataaataggagttagaataataatatttgagagtattggtaatatataaactctttagcggtataattagtttttttctctcaatttctatttttagatgtgatggaaaaatgactaattttgtagcattagtatcatgaactctaatcaaaatcttaatatcttcgtcacacgttagctctttgaagtttttaagagatgcatcagttggttctacagatggagtaggtgcaacaattttttgttctacacatgtatgtactggagccattgttttaactataatggtgcttgtatcgaaaaactttaatgcagatagcggaagctcttcgccgcgactttctacgtcgtaattgggttctaacgccgatctctgaatggatactagttttctaagttctaatgtgattctctgaaaatgtaaatccaattcctccggcattatagatgtgtatacatcggtaaataaaactatagtatccaacgatcccttctcgcaaattctagtcttaaccaaaaaatcgtatataaccacggagatggcgtatttaagagtggattcttctaccgttttgttcttggatgtcatataggaaactataaagtccgcactactgttaagaatgattactaacgcaactatatagtttaaattaagcattttggaaacataaaataactctgtagacgatacttgactttcgaataagtttgcagacaaacgaagaaagaacagacctctcttaatttcagaagaaaactttttttcgtattcctgacgtctagagtttatatcaataagaaagttaagaattagtcggttaatgttgtatttcattacccaagtttgagatttcataatattatcaaaagacatgataatattaaagataaagcgctgactatgaacgaaatagctatatggttcgctcaagaatatagtcttgttaaacgtggaaacgataactgtatttttaatcacgtcagcggcatctaaattaaatataggtatatttattccacacactctacaatatgccacaccatcttcataataaataaattcgttagcaaaattattaattttagtgaaatagttagcgtcaactttcatagcttccttcaatctaatttgatgctcacacggtgcgaattccactctaacatcccttttccatgcctcaggttcatcgatctctataatatctagttttttgcgtttcacaaacacaggctcgtctctcgcgatgagatctgtatagtaactatgtaaatgataactagatagaaagatgtagctatatagatgacgatcctttaagagaggtataataactttaccccaatcagatagactgttgttatggtcttcggaaaaagaatttttataaatttttccagtattttccaaatatacgtacttaacatctaaaaaatccttaatgataataggaatggataatccgtctattttataaagaaatacatatcgcacattatacttttttttggaaatgggaataccgatgtgtctacataaatatgcaaagtctaaatattttttagagaatcttagttggtccaaattcttttccaagtacggtaatagatttttcatattgaacggtatcttcttaatctctggttctagttccgcattaaatgatgaaactaagtcactatttttataactaacgattacatcacctctaacatcatcatttaccagaatactgatcttcttttgtcgtaaatacatgtctaatgtgttaaaaaaaagatcatacaagttatacgtcatttcatctgtggtattcttgtcattgaaggataaactcgtactaatctcttctttaacagcctgttcaaatttatatcctatatacgaaaaaatagcaaccagtgtttgatcatccgcgtcaatattctgttctatcgtagtgtataacaatcgtatatcttcttctgtgatagtcgatacgttataaaggttgataacgaaaatatttttatttcgtgaaataaagtcatcgtaggattttggacttatattcgcgtctagtagatatgcttttatttttggaatgatctcaattagaatagtctctttagagtccatttaaagttacaaacaactaggaaattggtttatgatgtataatttttttagtttttatagattctttattctatacttaaaaaatgaaaataaatacaaaggttcttgagggttgtgttaaattgaaagcgagaaataatcataaattatttcattatcgcgatatccgttaagtttgtatcgtaatggcgtggtcaattacgaataaagcggatactagtagcttcacaaagatggctgaaatcagagctcatctaaaaaatagcgctgaaaataaagataaaaacgaggatattttcccggaagatgtaataattccatctactaagcccaaaaccaaacgagccactactcctcgtaaaccagcggctactaaaagatcaaccaaaaaggaggaagtggaagaagaagtagttatagaggaatatcatcaaacaactgaaaaaaattctccatctcctggagtcagcgacattgtagaaagcgtggccgctgtagagctcgatgatagcgacggggatgatgaacctatggtacaagttgaagctggtaaagtaaatcatagtgctagaagcgatctctctgacctaaaggtggctaccgacaatatcgttaaagatcttaagaaaattattactagaatctctgcagtatcgacggttctagaggatgttcaagcagctggtatctctagacaatttacttctatgactaaagctattacaacactatctgatctagtcaccgagggaaaatctaaagttgttcgtaaaaaagttaaaacttgtaagaagtaaatgcgtgcacttttttataaagatggtaaactctttaccgataataattttttaaatcctgtatcagacgataatccagcgtatgaggttttgcaacatgttaaaattcctactcatttaacagatgtagtagtatatgaacaaacgtgggaggaggcgttaactagattaatttttgtgggaagtgattcaaaaggacgtagacaatacttttacggaaaaatgcatgtacagaatcgcaacgctaaaagagatcgtatttttgttagagtatataacgttatgaaacgaattaattgttttataaacaaaaatataaagaaatcgtccacagattccaattatcagttggcggtttttatgttaatggaaactatgttttttattagatttggtaaaatgaaatatcttaaggagaatgaaacagtagggttattaacactaaaaaataaacacatagaaataagtcccgatgaaatagttatcaagtttgtaggaaaggacaaagtttcacatgaatttgttgttcataagtctaatagactatataaaccgctattgaaactgacggatgattctagtcccgaagaatttctgttcaacaaactaagtgaacgaaaggtatacgaatgtatcaaacagtttggtattagaatcaaggatctccgaacgtatggagtcaattatacgtttttatataatttttggacaaatgtaaagtccatatctcctcttccgtcaccaaaaaagttaatagcattaactatcaaacaaactgctgaagtggtaggtcatactccatcaatttcaaaaagagcttatatggcaacgactattttagaaatggtaaaggataaaaattttttagatgtagtatctaaaactacgttcgatgaattcctatctatagtcgtagatcacgttaaatcatctacggatggatgatatagatctttacacaaataattacaagaccgataaatggaaatggataagcgtatgaaatctctcgcaatgacagctttcttcggagagctaagcacattagatattatggcattgataatgtctatatttaaacgccatccaaacaataccattttttcagtggataaggatggtcagtttatgattgatttcgaatacgataattataaggcttctcaatatttggatctgaccctcactccgatatctggagatgaatgcaagactcacgcatcgagtatagccgaacaattggcgtgtgcggatattattaaagaggatattagcgaatatatcaaaactactccccgtcttaaacgatttataaaaaaataccgcaatagatcagatactcgtatcagtcgagatacagaaaagcttaaaatagctctagctaaaggcatagattacgaatatataaaagacgcttgttaataagtaaatgaaaaaaaactagtcgtttataataaaacacgatatggatgccaacgtagtatcattttctactattgcgacgtatatagacgctttagcgaagaatgcttcggaattagaacagaggtctaccgcatacgaaataaataatgaattggaactagtatttattaagccgccattgattactttgacaaatgtagtgaatatctctacgattcaggaatcgtttattcgatttaccgttactaataaggaaggtgttaaaattagaactaagattccattatctaaggtacatggtctagatgtaaaaaatgtacagttagtagatgctatagataacatagtttgggaaaagaaatcattagtgacggaaaatcgtcttcacaaagaatgcttgttgagactatcgacagaggaacgtcatatatttttggattacaagaaatatggatcctctatccgactagaattagtcaatcttattcaagcaaaaacaaaaaactttacgatagactttaagctaaaatattttctaggatccggtgcccagtctaaaagttctttgttgcacgctattaatcatccaaagtcaaggcctaatacatctctggaaatagaattcacacctagagacaatgaaacagttccatatgatgaactaataaaggaattgacgactctctcgcgtcatatatttatggcttctccagagaatgtaattctttctccgcctattaacgcgcctataaaaacctttatgttgcctaaacaagatatagtaggtttggatctggaaaatctatatgccgtaactaagactgacggcattcctataactatcagagttacatcaaacgggttgtattgttattttacacatcttggttatattattagatatcctgttaagagaataatagattccgaagtagtagtctttggtgaggcagttaaggataagaactggaccgtatatctcattaagctaatagagcctgtgaatgcaatcaatgatagactagaagaaagtaagtatgttgaatctaaactagtggatatttgtgatcggatagtattcaagtcaaagaaatacgaaggtccgtttactacaactagtgaagtcgtcgatatgttatctacatatttaccaaagcaaccagaaggtgttattctgttctattcaaagggacctaaatctaacattgattttaaaattaaaaaggaaaatactatagaccaaactgcaaatgtagtatttaggtacatgtccagtgaaccaattatctttggagaatcgtctatctttgtagagtataagaaatttagcaacgataaaggctttcctaaagaatatggttctggtaagattgtgttatataacggcgttaattatctaaataatatctattgtttggaatatattaatacacataatgaagtgggtattaagtccgtggttgtacctattaagtttatagcagaattcttagttaatggagaaatacttaaacctagaattgataaaaccatgaaatatattaactcagaagattattatggaaatcaacataatatcatagtcgaacatttaagagatcaaagcatcaaaataggagatatctttaacgaggataaactatcggatgtgggacatcaatacgccaataatgataaatttagattaaatccagaagttagttattttacgaataaacgaactagaggaccgttgggaattttatcaaactacgtcaagactcttcttatttctatgtattgttccaaaacatttttagacgattccaacaaacgaaaggtattggcgattgattttggaaacggtgctgacctggaaaaatacttttatggagagattgcgttattggtagcgacggatccggatgctgatgctatagctagaggaaatgaaagatacaacaaattaaactctggaattaaaaccaagtactacaaatttgactacattcaggaaactattcgatccgatacatttgtctctagtgtcagagaagtattctattttggaaagtttaatatcatcgactggcagtttgctatccattattcttttcatccgagacattatgctaccgtcatgaataacttatccgaactaactgcttctggaggcaaggtattaatcactaccatggacggagacaaattatcaaaattaacagataaaaagacttttataattcataagaatttacctagtagcgaaaactatatgtctgtagaaaaaatagctgatgatagaatagtggtatataatccatcaacaatgtctactccaatgactgaatacattatcaaaaagaacgatatagtcagagtgtttaacgaatacggatttgttcttgtagataacgttgatttcgctacaattatagaacgaagtaaaaagtttattaatggcgcatctacaatggaagatagaccgtctacaaaaaactttttcgaactaaatagaggagccattaaatgtgaaggtttagatgtcgaagacttacttagttactatgttgtttatgtcttttctaagcggtaaataataatatggtatgggttctgatctcccagttctaaatgcattaaataattccaatagagcgatttttgttcctataggaccttccaactgtggatactctgtattgttaatagatatattaatacttttgtcgggtaacagaggttctacgtcttctaaaaataaaagttttataacatctggcctgttcataaataaaaacttggcgattctatatatactcttattatcaaatctagccattgtcttatagatgtgagctactgtaggtgtaccatttgattttctttctaatactatatatttctctcgaagaagttcttgcacatcatctgggaataaaatactactgttgagtaaatcagttattttttttatatcgatattgatggacatttttatagttaaggataataagtatcccaaagtcgataacgacgataacgaagtatttatacttttaggaaatcacaatgactttatcagattaaaattaacaaaattaaaggagcatgtatttttttctgaatatattgtgactccagatacatatggatctttatgcgtcgaattaaatgggtctagttttcagcacggcggtagatatatagaggtggaggaatttatagatgctggaagacaagttagatggtgttctacatccaatcatatatctaaagatatacccgaagatatgcacactgataaatttgtcatttatgatatttatacgtttgattcgttcaagaataaacgattggtattcgtacaggtacctccgtcgttaggagatgatagtcatttgactaatccgttattgtcaccgtattatcgtaattcagtagccagacaaatggtcaatgatatgatttttaatcaagattcatttttaaaatatttattagaacatctgattagaagccactatagagtttctaaacatataacaatagttagatacaaggataccgaagaattaaatctaacgagaatatgttataatagagataagtttaaggcgtttgtattcgcttggtttaacggcgtttcggaaaatgaaaaggtactagatacgtataaaaaggtatctaatttgatataatgaattcagtgactgtatcacacgcgccatatactattacttatcacgatgattgggaaccagtaatgagtcaattggtagagttttataacgaagtagccagttggctgctacgagacgagacgtcgcctattcctgataagttctttatacagttgaaacaaccgcttagaaataaacgagtatgtgtgtgtggtatagatccgtatccgaaagatggaactggtgtaccgttcgaatcaccaaattttacaaaaaaatcaattaaggagatagcttcatctatatctagattaaccggagtaattgattataaaggttataaccttaatataatagacggggttataccctggaattattacttaagttgtaaattaggagaaacaaaaagtcacgcgatttactgggataagatttccaagttactgctgcagcatataactaaacacgttagtgttctttattgtttgggtaaaacagatttctcgaatatacgggccaagttagaatccccggtaactaccatagtcggatatcatccagcggctagagaccgccaattcgagaaagatagatcatttgaaattatcaacgttttactggaattagacaacaaggcacctataaattgggctcaagggtttatttattaatgctttagtgaaattttaacttgtgttctaaatggatgcggctattagaggtaatgatgttatctttgttcttaagactataggtgtcccgtcagcgtgcagacaaaatgaagatccaagatttgtagaagcatttaaatgcgacgagttagaaagatatattgagaataatccagaatgtacactattcgaaagtcttagggatgaggaagcatactctatagtcagaattttcatggatgtagatttagacgcgtgtctagacgaaatagattatttaacggccattcaagattttattatcgaggtgtcaaactgtgtagctagattcgcgtttacagaatgcggcgccattcatgaaaatgtaataaaatccatgagatctaatttttcattgactaagtctacaaatagagataaaacaagttttcatattatctttttagatacgtataccactatggatacattgatagctatgaaacgaacactattagaattaagtagatcatctgaaaatccactaaccagatcgatagacactgccgtatataggagaaaaacaactcttcgggttgtaggtactaggaaaaatccaaattgcgacactattcatgtaatgcaaccaccgcatgataatatagaagattacctattcacttacgtggatatgaacaacaatagttattacttttctctacaacaacgattggaggatttagttcctgataagttatgggaaccagggtttatttcattcgaagacgctataaaaagagtttcaaaaatattcattaattctataataaactttaatgatctcgatgaaaataattttacaacggtaccactggtcatagattacgtaacaccttgtgcattatgtaaaaaacgatcgcataaacatccgcatcaactatcgttggaaaatggtgctattagaatttacaaaactggtaatccacatagttgtaaagttaaaattgttccgttggatggtaataaactgtttaatattgcacaaagaattttagacactaactctgttttattaaccgaacgaggagaccatatagtttggattaataattcatggaaatttaacagcgaagaacccttgataacaaaactaattttgtcaataagacatcaactacctaaggaatattcaagcgaattactctgtccaagaaaacgaaagactgtagaagctaacatacgagacatgttagtagattcagtggagaccgatacctatccggataaacttccgtttaaaaatggtgtattggacctggtagacggaatgttttactctggagatgatgctaaaaaatatacgtgtactgtatcaaccggatttaaatttgacgatacaaagttcgtcgaagacagtccagaaatggaagagttaatgaatatcattaacgatatccaaccattaacggatgaaaataagaaaaatagagagctatatgaaaaaacattatctagttgtttatgcggtgctaccaaaggatgtttaacattcttttttggagaaactgcaactggaaagtcgacaaccaaacgtttgttaaagtctgctatcggtgacctgtttgttgagacgggtcaaacaattttaacagatgtattggataaaggacctaatccatttatcgctaacatgcatttgaaaagatctgtattctgtagcgaactacctgattttgcctgtagtggatcaaagaaaattagatctgacaatattaaaaagttgacagaaccttgtgtcattggaagaccgtgtttctccaataaaattaataatagaaaccatgcgacaatcattatcgatactaattacaaacctgtttttgataggatagataacgcattaatgagaagaattgccgtcgtgcgattcagaacacacttttctcaaccttctggtagagaggctgctgaaaataatgacgcgtacgataaagtcaaactattagacgaggggttagatggtaaaatacaaaataatatatatagatttgcatttctatacttgttggtgaaatggtacaaaaaatatcatgttcctattatgaaactatatcctacacccgaagagattcctgactttgcattctatctcaaaataggtactctgttggtatctagctctgtaaagcatattccattaatgacggacctctccaaaaagggatatatattgtacgataatgtggtcactcttccgttgactactttccaacagaaaatatccaagtattttaattctagactatttggacacgatatagagagcttcatcaatagacataagaaatttgccaatgttagtgatgaatatctgcaatatatattcatagaggatatttcatctccgtaaatatatgctcatatatttatagaagatatcacatatctaaatgaataccggaatcatagatttatttgataatcatgttgatagtataccaactatattacctcatcagttagctactctagattatctagttagaactatcatagatgagaacagaagcgtgttattgttccatattatgggatcaggtaaaacaataatcgctttgttgttcgccttggtagcttccagatttaaaaaggtttacattctagtgccgaacatcaacatcttaaaaattttcaattataatatgggtgtagctatgaacttgtttaatgacgaattcatagctgagaatatctttattcattccacaacaagtttttattctcttaattataacgataacgtcattaattataacggattatctcgctacaataactctatttttatcgttgatgaggcacataatatctttgggaataatactggagaacttatgaccgtgataaaaaataaaaacaagattccttttttactattgtctggatctcccattactaacacacctaatactctgggtcatattatagatttaatgtccgaagagacgatagattttggtgaaattattagtcgtggtaagaaagtaattcagacacttcttaacgaacgcggtgtgaatgtacttaaggatttgcttaaaggaagaatatcatattacgaaatgcctgataaagatctaccaacgataagatatcacggacgtaagtttctagatactagagtagtatattgtcacatgtctaaacttcaagagagagattatatgattactagacgacagctatgttatcatgaaatgtttgataaaaatatgtataacgtgtcaatggcagtattgggacaacttaatctgatgaataatttagatactttatttcaggaacaggataaggaattgtacccaaatctgaaaataaataatggcgtgttatacggagaagaattggtaacgttaaacattagttccaaatttaaatactttattaatcggatacagacactcaacggaaaacattttatatacttttctaattctacatatggcggattggtaattaaatatatcatgctcagtaatggatattctgaatataatggttctcagggaactaatccacatatgataaacggcaaaccaaaaacatttgctatcgttactagtaaaatgaaatcgtctttagaggatctattagatgtgtataattctcctgaaaacgatgatggtagtcaattgatgtttttgttttcatcaaacattatgtccgaatcctatactctaaaagaggtaaggcatatttggtttatgactatcccagatactttttctcaatacaaccaaattcttggacgatctattagaaaattctcttacgccgatatttctgaaccagttaatgtatatcttttagccgccgtatattccgatttcaatgacgaagtgacgtcattaaacgattacacacaggatgaattaattaatgttttaccatttgacatcaaaaagctgttgtatctaaaatttaagacgaaagaaacgaatagaatatactctattcttcaagagatgtctgaaacgtattctcttccaccacatccatcaattgtaaaagttttattgggagaattggtcagacaatttttttataataattctcgtattaagtataacgataccaagttacttaaaatggttacatcagttataaaaaataaagaagacgctaggaattacatagatgatattgtaaacggtcacttctttgtatcgaataaagtatttgataaatctcttttatacaaatacgaaaacgatattattacagtaccgtttagactttcctacgaaccatttgtttggggagttaactttcgtaaagaatataacgtggtatcttctccataaaactgatgagatatataaagaaataaatgtcgagctttgttaccaatggatacctttccgttacattggaaccacacgagctgacgttagacataaaaactaatattaggaatgccgtatataagacgtatctccatagagaaattagtggtaaaatggccaagaaaatagaaattcgtgaagacgtggaattacctctcggcgaaatagttaataattctgtagttataaacgttccgtgtgtaataacctacgcgtattatcacgttggggatatagtcagaggaacattaaacatcgaagatgaatcaaatgtaactattcaatgtggagatttaatctgtaaactaagtagagattcgggtactgtatcatttagcgattcaaagtactgcttttttcgaaatggtaatgcgtatgacaatggcagcgaagtcactgccgttctaatggaggctcaacaaggtatcgaatctagttttgtttttctcgcgaatatcgtcgactcataaaaaagagaatagcggtaagtataaacacgaatactatggcaataattgcgaatgttttattctcttcgatatatttttgataatatgaaaaacatgtctctctcaaatcggacaaccatctcataaaatagttctcgcgcgctggagaggtagttgccgctcgtataatctctccagaataatatacttgcgtgtcgtcgttcaatttatacggatttctatagttctctgttatataatgcggtttgccctcatgattagacgacgacaatagtgttctaaatttagatagttgatcagaatgaatgtttattggcgttggaaaaattatccatacagcgtctgcagagtggttgatagttgttcctagatatgtaaaataatccaacttactaggcagcaaattgtctagataaaatactgaatcaaacggtgcagacgtattggcggatctaatggaatccaattgattaactatcttttgaaaatatacatttttatgatccaatacttgtaagaatatagaaataatgataagtccatcatcgtgtttttttgcctcttcataagaactatattttttcttattccaatgaacaagattaatctctccagagtatttgtacacatctatcaagtgattggatccataatcgtcttcctttccccaatatatatgtagtgatgataacacatattcattggggagaaaccctccacttatatatcctcctttaaaattaatccttactagttttccagtgttctggatagtggttggtttcgactcattataatgtatgtctaacggcttcaatcgcgcgttagaaattgcttttttagtttctatattaataggagatagttgttgcggcatagtaaaaatgaaatgataactgtttaaaaatagctcttagtatgggaattacaatggatgaggaagtgatatttgaaactcctagagaattaatatctattaaacgaataaaagatattccaagatcaaaagacacgcatgtgtttgctgcgtgtataacaagtgacggatatccgttaataggagctagaagaacttcattcgcgttccaggcgatattatctcaacaaaattcagattctatctttagagtatccactaaactattacggtttatgtactacaatgaactaagagaaatctttagacggttgagaaaaggttctatcaacaatatcgatcctcactttgaagagttaatattattgggtggtaaactagataaaaaggaatctattaaagattgtttaagaagagaattaaaagaggaaagtgatgaacgtataacagtaaaagaatttggaaatgtaattctaaaacttacaacacgggataaattatttaataaagtatatataagttattgcatggcgtgttttattaatcaatcgttggaggatttatcgcatactagtatttacaatgtagaaattagaaagattaaatcattaaatgattgtattaacgacgataaatacgaatatctgtcttatatttataatatgctagttaatagtaaatgaacttttacagatctagtataattagtcagattattaagtataatagacgactagctaagtctattatttgcgaggatgactctcaaattattacactcacggcattcgttaaccaatgcctatggtgtcataaacgagtatccgtgtccgctattttattaactactgataacaaaatattagtatgtaacagacgagatagttttctctattctgaaataattagaactagaaacatgtttagaaagaaacgattatttctgaattattccaattatttgaacaaacaggaaagaagtatactatcgtcatttttttctctagatccagctactactgataatgatagaatagacgctatttatccgggtggcatacccaaaaggggtgagaatgttccagagtgtttatccagggaaattaaagaagaagttaatatagacaattcttttgtattcatagacactcggttttttattcatggcatcatagaagataccattattaataaattttttgaggtaatcttctttgtcggaagaatatctctaacgagtgatcaaatcattgatacatttaaaagtaatcatgaaatcaaggatctaatatttttagatccgaattcaggtaatggactccaatacgaaattgcaaaatatgctctagatactgcaaaacttaaatgttacggccatagaggatgttattatgaatcattaaaaaaattaactgaggatgattgattaaaaaatataaattaatttaccatcgtgtatttttataacgggattgtccggcatatcatgtagatagttaccgtctacatcgtatactcgaccatctacgcctttaaatcctctatttattgacattaatctattagaattggaataccaaatattagtaccctcaattagtttattggtaatattttttttagacgatagatcgatggctcttgaaaccaaggttttccaaccggactcattgtcgatcggtgagaagtctttttcattagcatgaatccattctaatgatgtatgtttaaacactctaaacaattggacaaattcttttgatttgctttgaatgatttcaaataggtcttcgtctacagtaggcataccattagataatctagccattataaagtgcacgtttacatatctacgttctggaggagtaagaacgtgactattgagacgaatggctcttcctactatctgacgaagagacgcctcgttccatgtcatatctaaaatgaagatatcattaattgagaaaaaactaataccctcgcctccactagaagagaatacgcatgttttaatgcattctccgttagtgtttgattcttggttaaactcagccaccgccttgattctagtatcttttgttctagatgagaactctatattagagataccaaagactttgaaatatagtaataagatttctattcctgactgattaacaaatggttcaaagactagacatttaccatgggatgctaatattcccaaacatacatctataaatttgacgcttttctcttttaattcagtaaatagagagatatcagccgcactagcatcccctttcaatagttctccctttttaaaggtatctaatgcggatttagaaaactctctatctcttaatgaatttttaaaatcattatatagtgttgctatctcttgcgcgtattcgcccggatcacgattttgtctttcaggaaagctatcgaacgtaaacgtagtagccatacgtctcagaattctaaatgatgatatacctgtttttatttcagcgagtttagccttttgataaatttcttcttgctttttcgacatattaacgtatcgcattaatactgttttcttagcgaatgatgcagacccttctacgtcatcaaaaatagaaaactcgttattaactatatacgaacatagtcctcctagtttggagactaattctttttcatcgactagacgtttattctcaaatagcgattggtgttgtaaggatcctggtcgtagtaagttaaccaacatggtgaattcttgcacactattgacgataggtgtagccgataaacaaatcatcttatggttttttaacgcaatggtcttagataaaaaattatatactgaacgagtaggacggatcttaccatcttctttgattaatgatttagaaatgaagttatgacattcatcaataatgacgcatattctactcttggaattaatagttttgatattagtaaaaaatttatttctaaaattttgatcatcgtaattaataaaaatacaatccttcgttatctctggagcgtatctgagtatagtgttcatccaaggatcttctatcaaagcctttttcaccaataagataatagcccaattcgtataaatatccttaagatgtttgagaatatatacagtagtcattgttttaccgacacccgtttcatggaacaataaaagagaatgcatactgtctaatcctaagaaaactcttgctacaaaatgttgataatccttgaggcgtactacgtccgaccccatcatttcaacgggcatattagtagttctgcgtaaggcataatcgatataggccgcgtgtgatttactcatttatgagtgataagtaataactatgttttaaaaatcacagcagtagtttaactagtcttctctgatgtttgttttcgatactttttgaatcagaagtcatactagaataaagcaacgagtgaacgtaatagagagcttcgtatactctattcgaaaactctaagaacttattaatgaattccgtatccactggattgtttaaaatactaaattgaacactgttcacatccttccaagaagaagacttagtgacggacttaacatgagacataaataaatccaaattttttttacaaacatcactagccaccataatggcgctatctttcaaccagctatcgcttacgcattttagcagtctaacatttttaaagagactacaatatattctcatagtatcgattacacctctaccgaataaagttggaagtttaataatacaatatttttcgtttacaaaatcaaataatggtcgaaacacgtcgaaggttaacatcttataatcgctaatgtatagattgttttcagtgagatgattattagatttaatagcatctcgttcacgtttgaacagtttattgcgtgcgctgaggtcggcaactacggcgtccgctttagtactcctcccataatactttacgctattaatctttaaaatttcatagactttatctagatcgctttctggtaacatgatatcatgtgtaaaaagttttaacatgtcggtcggcattctatttagatcattaactctagaaatctgaagaaagtaattagctccgtattccagactaggtaatgggcttttacctagagacagattaagttctggcaatgtttcataaaatggaagaaggacatgcgttccctcccggatattttttacaatttcatccatttacaactctatagtttgttttcattattattagttattatctcccataatcttggtaatacttaccccttgatcgtaagataccttatacaggtcattacatacaactaccaattgtttttgtacataatagattggatggttgacatccatggtggaataaactactcgaacagatagtttatctttccccctagatacattagccgtaatagttgtcggcctaaagaatatctttggtgtaaagttaaaagttagggttcttgttccattattgctttttgtcagtagttcattataaattctcgagatgggtccgttctctgaatatagaacatcatttccaaatctaacttctagtctagaaataatatcggtcttattcttaaaatctattcccttgatgaagggatcgttaatgaacaaatccttggcctttgattcggctgatctattatctccgttatagacgttacgttgactagtccaaagacttacaggaatagatgtatcgatgatgttgatactatgtgatatgtgagcaaagattgttctcttagtggcatcactatatgttccagtaatggcggaaaactttttagaaatgttatatataaaagaattttttcgtgttccaaacattagcagattagtatgaagataaacactcatattatcaggaacattatcaatttttacatacacatcagcatcttgaatagaaacgataccatcttctggaacctctacgatctcggcagactccggataaccagtcggtgggccatcgctaacaataactagatcatccaacaatctactcacatatgcatctatataatctttttcatcttgtgagtaccctggatacgaaataaatttattatccgtatttccataataaggtttagtataaacagagagagatgttgccgcatgaacttcagttacagtcgccgttggttggtttatttgacctattactctcctaggtttctctataaacgatggtttaatttgtacattcttaaccatatatccaataaagctcaattcaggaacataaacaaattctttgttgaacgtttcaaagtcgaacgaagagtcacgaataacgatatcggatactggattgaaggttaccgttacggtaatttttgaatcggatagtttaagactgctgaatgtatcttccacatcaaacggagttttaatataaacgtatactgtagatggttctttaatagtgtcattaggagttaggccaatagaaatatcattaagttcactagaatatccagagtgtttcaaagcaattgtattattgatacaattattatataattcttcgccctcaatttcccaaataacaccgttacacgaagagatagatacgtgattaatacatttatatccaacatatggtacgtaactgaatcttcccatacctttaacttctggaagttccaaactcagaaccaaatgattaagcgcagtaatatactgatccctaatttcgaagctagcgatagcctgattgtctggaccatcgtttgtcataactccggatagagaaatatattgcggcatatacaaagttggaatttgactatcgactgcgaagacattagaccgtttaatagagtcatccccaccgatcaaagaattaatgatagtattattcattttctatttaaaatggaaaaagcttacaataaactccgtagagaaatatctataatttgtgagttttccttaaagtaacagcttccgtaaacgccgtctttatctcttagtaggtttattgtatttatgaccttttccttatcttcatagaatactaaaggcaacaaagaaatttttggttcttctctaagagctacgtgagacttaaccatagaagccaacgaatccctacatattttagaacagaaataccctacttcaccacccttgtatgtctcaatactaataggtctaaaaaccaaatcttgattacaaaaccaacacttatcaattacactatttgtcttaatagacacatctgccatagatttataatactttggtagtatacaagcgagtgcttcttctttagcgggcttaaagactgctttaggtgctgaaataaccacatctggaaggcttactcgcttagccatttaattacggaactatttttttatacttctaatgagcaagtagaaaacctctcatctacaaaaacgtactcgtgtccataatcctctaccatagttacacgttttttagatctcatatgtgctaaaaagttttcccatactaattggttactattatttttcgtataatttttaacagtttgaggttttagatttttagttacagaagtgatatcgaatattttatccaaaaagaatgaataattaattgtcttagaaggagtgttttcttggcaaaagaataccaagtgcttaaatatttctactacttcattaatcttttctgtactcagattcagtttctcatcttttacttgattgattatttcaaagactaacttataatcctttttatttattctctcgttagccttaagaaaactagatacaaaatttgcatctacatcatccgtggatatttgatttttttccatgatatccaagagttccgagataatttctccagaacattgatgagacaataatctccgcaatacatttctcaaatgaataagtttattagacacgtggaagtttgactttttttgtacctttgtacatttttgaaataccgactcgcaaaaaatacaatattcatatccttgttcagatactataccgttatgtctacaaccgctacataatcgtagattcatgttaacactctacgtatctcgtcgtccaatattttatataaaaacattttatttctagacgttgccagaaaatcctgtaatatttttagttttttgggctgtgaataaagtatcgccctaatattgttaccgtcttccgccaatatagtagttaaattatccgcacatgcagaagaacaccgcttaggcggattcagtacaatgttatatttttcgtaccaactcatttaaatatcataatctaaaatagttctgtaatatgtctagcgctaatatattgatcataatcctgtgcataaattaagatacaacaatgtctcgaaatcatcgacatggcttcttccatagttagaagatcgtcgtcaaagttagcaacgtgattcatcaacatttgctgttttgaggcagcaaatactgaaccgtcgccattcaaccattcataaaaaccatcgtctgaatccattgataatttcttgtactggtttttgagagctcgcatcaatctagcatttctagctcccggattgaaaacagaaagaggatcgtacatccagggtccattttctgtaaatagaatcgtataatgtcccttcaagaagatatcagacgatccacaatcaaagaattggtctccgagtttgtaacaaactgcggactttaacctatacatgataccgtttagcataatttctggtgatacgtcaatcggagtatcatctattagagatctaaagccggtgtaacattctccaccaaacatattcttattctgacgtcgttctacataaaacatcattgctccattaacgataacaggggaatgaacagcactacccatcacattagttcccaatggatcaatgtgtgtaactccagaacatcttccatagcctatgttaggaggagcgaacaccactcttccactattgccatcgaatgccatagaataaatatccttggaattgatagaaatcggactgtcggatgttgtgatcatcttcataggattaacaactatgtatggtgccgcctgaagtttcatatcgtaactgatgccgtttataggtctagccacagaaaccaacgtaggtctaaatccaactatagacaaaatagaagccaatatctgttcctcatctgtcataacttgagagcatccagtatgaataatcttcattagatggggatctaccgcatcatcatcgttacaataaaaaattcccattctaatgttcataattgcttttctaatcatggtatgcatgtttgctctctgaatctctgtggaaattagatctgatacacctgtaatcactatcggattatcctccgtaagacgattaaccaacaacatataattataagactttacttttctaaattcataaagttgctggattaggctataggtgtctccatgtacatacgcgttctcgagcgcaggaagtttaataccgaatagtgccatcagaataggatgaatatagtaattagtttctggttttctataaataaaagacaaatcttgtgaactagacatatcggtaaaatgcatggattggaatcgtgtagtcgacagaagaatatgatgattagatggagagtatattttatctaactctttgagttggtcaccgattctaggactagctcgagaatgaataagtactaaaggatgagtacatttcacagaaacactagcattgttcaatgtgctctttacatgggtaaggagttgaaatagctcgtttctatttgttctgacaatatttagtttattcataatgttaagcatatcctgaatagtaaagttagatgtgtcatacttgttagtagttagatatttagcaattgcattcccatcatttctcaatctcgtactccaatcatgcgtggatgctacttcgtcgatggaaaccatacaatcctttttgataggctgttgagattgatcatttcctgcacgtttaggtttggtacgttgatttctagcccctgcggatataaagtcatcgtctacaatttgggacaatgaattgcatacactacaagacaaagatttatcagaagtgtgaatatgatcttcatctaccaaagaaagagtttgattagtataactagattttagtcctgcgttagatgttaaaaaaacatcgctattgaccacggcttccattatttatattcgtagtttttactcgaaagcgtgattttaatatccaatcttattacttttggaatcgttcaaaacctttgactagttgtagaatttgatctattgccctacgcgtatactcccttgcatcatatacgttcgtcaccagatcgtttgtttcggcctgaagttggtgcatatctctttcaacattcgacatgagatccttaagggccatatcgtctagattttgttgagatgctgctcctggatttggattttgttgtgctgttgtacatactgtaccaccagtaggtgtaggagtacatacagtggccacaataggaggttgagaaagtgtaaccgttggagtagtacaagaaatacttccatccgattgttgtgtacatgtagttgttggtaacgtctgagaaggttgggtagatggcggcgtcgtcgttttttgatctttattaaatttagagataatatcctgaacagcattgctcggcgtcaacgctggaaggagtgaactcgccggcgcatcagtatcttcagacagccaatcaaaaagattagacatatcagatgatgtattagtttgttgtcgtggttttggtgtaggagcagtactactaggtagaagaataggagccgatgtagctgttggaaccggctgtggagttatatgaatagttggttgtagcggttggataggctgtctgctggcggccatcatattatctctagctagttgttctcgcaactgtctttgataatacgactcttgagactttagtcctatttcaatcgcttcatcctttttcgtatccggatccttttcttcagaataatagattgacgactttggtgtagaggattctgccagcctctgtgagaacttgttaaagaagtccatttaaggctttaaaattgaattgcgattataagattaaatggcagacacagacgatattatcgactatgaatccgatgatctcaccgaatacgaggatgatgaagaagaggaagaagatggagagtcactagaaactagtgatatagatcccaaatcttcttataagattgtagaatcagcatccactcatatagaagatgcgcattccaatcttaaacatatagggaatcatatatctgctcttaaacgacgctatactagacgtataagtctatttgaaatagcgggtataatagcagaaagctataacttgcttcaacgaggaagattacctctagtttcagaattttctgacgaaacgatgaagcaaaatatgctacatgtaattatacaagagatagaggagggttcttgtcctatagtcatcgaaaagaacggagaattgttgtcggtaaacgattttgacaaagatggtctaaaattccatctagactatattatcaaaatttggaaacttcaaaaacgatattagaatttatacgaatatcgttctctaaatgtcacaatcaagtctcgcatgttcagcaatttattgtcgtactttatatcgtgttcattaacgatatcttgcaaaatagtaatgattctatcttccttcgatagatattcttcagagattattgtcttatattctttcttgttatcagatatgaatttgataagactttgaacattattgatacccgtctgtttaattttttctacagatattttagttttggcagattctatcgtatctgtcaatagacatccaacatcgacattcgacgtcaattgtctataaatcaacgtataaattttagaaataacattagcgaattgttgtgcgttgatgtcgttattctgaaacagtatgattttaggtagcattttcttaacaaagagaacgtatttattgttactcagttgaacagatgatatatccagattactaacgcatctgattccgtataccaaactttcagaagaaatggtatacaattgtttgtattcattcaatgtctctttttcagaaattagtttagagtcgaatactgcaataattttcaagagatagttttcatcagataagattttatttagtgtagatatgataaaactattgttttgttggagaacttgatacgccgcgttctctgtagtcgacgctctcaaatgggaaacaatctccattatttttttggaatcggatactatatcttcggtatcttgacgcagtctagtatacatagagttaagagagattagagtttgtacattaagcaacatgtctctaaatgtggctacaaacttttcctttttcacatcatctagtttattatataccgatttcacaacggcaccagatttaaggaaccagaatgaaaaactctgataactacaatatttcatcatagttacgattttatcatcttctatagttggtgtaatagcgcatacctttttctccaagactggaaccaacgtcataaaaatgtttaaatcaaaatccatatcaacatctgatgcgctaagaccagtctcgcgttcaagattatctttactaatggtgacgaactcatcgtataaaactctaagtttgtccattatttatttacagatttagttgtttaatttatttgtgctcttccagagttgggatagtatttttctaacgtcggtattatattattaggatctacgttcatatgtatcataatattaatcatccacgttttgataaatctatctttagcttctgaaataacgtatttaaacaaaggagaaaaatatttagctacggcatcagacgcaataacattttttgtaaatgtaacgtatttagacgacagatcttcgttaaaaagttttccatctatgtagaatccatcggttgttaacaccattcccgcgtcagattgaataggagtttgaatagtttgttttggaaatagatccttcaataacttatagttgggtgggaaaaaatcgattttatcactagactctttcttttttactatcattacctcatgaactatttcttgaatgagtatatgtattttctttcctatatcggacgcgttcattggaaaatataccatgtcgttaactataagaatatttttatcctcgtttacaaactgaataatatcagatgtagttcgtaaacgaactatatcatcaccagcacaacatctaactatatgatatccactagtttcctttagccgtttattatcttgttccatattagcagtcattccatcatttaagaaggcgtcaaaaataatagggagaaatgacattttggattctgttacaactttaccaaaattaaggatatacggacttactatctttttctcaacgtcaatttgatgaacacacgatgaaaatgtgcttctatgagattgatcatgtagaaaacaacaagggatacaatatttccgcatatcatgaaatatattaagaaatcccaccttattatatttccccaaaggatccatgcacgtaaacattatgccgttatcattaataaagacttctttctcatcggatctgtaaaagttgttactgatttttttcattccaggatctagataattaataatgatgggttttctattcttattctttgtattttggcatatcctagaccagtaaacagtttccactttggtaaaatcagcagacttttgaacgctattaaacatggcattaatggcaataactaaaaatgtaaaatatttttctatgttaggaatatggtttttcactttaatagatatatggtttttggccaaaatgatagatatttttttatccgaggatagtaaaatattattagtcgccgtctctataaaaatgaagctagtctcgatatccaattttattctagaattgataggagtcgccaaatgtaccttatacgttatatctcccttgatgcgttccatttgtgtatctatatcggacacaagatctgtaaatagttttacgttattaatcatcacggtatcgccgtcgctagataacgctaatgtaccatccaagtcccaaatggagagatttaactgttcatcgtttagaataaaatgattaccggtcatattaataaagtgttcatcgtatctagataacaacgacttataattaatgtccaagtcttgaactcgctgaatgatcttttttaacccagttagttttagattggtacgaaatatattgttaaactttgattctacagtaatgtccaaatctagttgtggaaatacttccatcaacattgtttcaaacttgataatattattatctacatcttcgtacgatccaaattccggaatagatgtatcgcacgctctggccacccagataaccaaaaagtcacacgctccaggatatacattgtataaaaagctatcgttttttagtagggtttttttctgcgtgtatacgaagggattaaaaatagtattatcaacgtaactatattccaaattattcttatgagaatagataataatatcgtccttaatatctaacaaatttcctaaatatccctttaattgagtcattcgaagcgtcaatagaatatgtctcttaactatttccggctgttgtatatttaaatgacttcgtaaaaaataatatatgggcgacttctcatctatgtaatcatatggagtgagatatagggctcgttctacctcctgccccttacccacctgtaataccaattgcggacttactatatatcgcatatttatatcgtggggtaaagtgaaaatctactaccgatgatgtaagtcttacaatgttcgaaccagtaccagatcttaatttggaggcctccgtagaactaggggaggtaaatatagatcaaacaacacctatgataaaggagaatagcggttttatatcccgcagtagacgtctattcgcccatagatctaaggatgatgagagaaaactagcactacgattctttttacaaagactttattttttagatcatagagagattcattatttgttcagatgcgttgacgctgtaaaagacgtcactattaccaaaaaaaataacattatcgtggcgccttatatagcacttttaactatcgcatcaaaaggatgcaaacttacagaaacaatgattgaagcattctttccagaactatataatgaacatagtaagaaatttaaattcaactctcaagtatccatcatccaagaaaaactcggataccagtttggaaactatcacgtttatgattttgaaccgtattactctacagtagctctggctattcgagatgaacattcatctggcatttttaatatccgtcaagagagttatctggtaagttcattatctgaaataacatatagattttatctaattaatctaaaatctgatcttgttcaatggagtgctagtacgggcgctgtaattaatcaaatggtaaatactgtattgattacagtgtatgaaaagttacaactggtcatagaaaatgattcacaatttacatgttcattggctgtggaatcaaaacttccaataaaattacttaaagatagaaatgaattatttacaaaattcattaacgagttaaaaaagaccagttcattcaagataagcaaacgcgataaggatacgctactaaaatattttacttaggactggagttagaatttatagacgactcatttcgtttatcattgttactattattactattactatcattattagtgttggcattattagtattcttcttgtcatcttgttcagaaatatacagcaatgctatacctaatactaaatacattatcatgctcgcaatggctctaacaacaacgaaccaaaatgaatttggtcgtagcttttgttcacaaaaatacataaagaaatgtctacataaatctatggcgccattggctacttgaaatagcgccagtcctcctacagattttaatatagctgtataacatgacatttattcatcatcaaaagagacagagtcaccatctgtcatatttagattttttttcatgtgttcaaagtatcctctactcatttcattataatagtttatcatacttagaattttaggacggatcaatgagtaagacttgactagatcgtcagtagtaatttgtgcatcgtctattctgcatccgcttcgtcgaataatgtatagcatcgctttgagattctccatagctatcaagtctttatacaatgacatggaaatatctgtgaatactttatacttctccaacatcgatgccttaacatcatcgcctactttagcattgaaaatacgttctattgtgtagatggatgtagcaagatttttaaacaacaatgccatcttacacgatgattgcctcaagtctccaatcgtttgtttagaacgattagctacagagtccaatgcttggctgactagcatattattatctttagaaattgtattcttcaatgaggcgtttatcatatctgtgatttcgttagtcatattacagtctgactgggttgtaatgttatccaacatatcacctatggatacggtacacgtaccagcatttgtaataatcctatctaagatgttgtatggcattgcgcagaaaatatcttctcctgtaatatctccactctcgataaatctactcagattattcttaaatgccttattctctggagaaaagatatcagtgtccatcatttcattaatagtatacgcagaaaagataccacgagtatcaattctatccaagatacttatcggttccgagtcacagataatggtttcctctccttcgggagatcctgcatagaaatatctaggacaatagtttctatactgtctgtaactctgataatctctaaagtcactaactgataccatgaaattgagaagatcaaacgctgaagtaattaatttttctgcctcgtttttactacaactagttttcatcaatgtagtgacgatgtattgtttagttacttttggtctaatactgatgatagagatattattgcttcccataatggatcttctagtagtcaccttaaagcccattgatgcgaatagcagatagataaagtcttggtatgactcctttctaatatagtacggactacctttgtcacccaactttatacccacataagccataacaacctctttaatagccgtttcatgaggtttatcagccatgagcctgagtagttggaagaatctcatgaatcccgtctcagaaagtcctatatgcatgatagatttatctttcctgggaaactctcgtatagtcatagatgaaatactctttaaagtttctgaaataagattagtaacagtcttacctccgactactctaggtaacaaacaaactctaataggtgttttctctgcggagataatatcagaaaggatagagcaataagtagtattattgtgattataaagaccgaatacataacaggtagaatttataaacatcatgtcctgaaggtttttagacttgtattcctcgtaatccataccgtcccaaaacatggatttggtaactttgatagccgtagatctttgttccttcgccaacaggttaaagaaattaataaagaatttgttgtttctatttatgtccacaaattgcacgtttggaagcgccacggttacattcactgcagcattttgaggatcgcgagtatgaagtacgatgttattgtttactggtatatctggaaagaaatctaccagtctaggaataagagattgatatcgcatagaaatagtaaagtttataatctcatcatcgaagagcattttgttaccattgtaataaatatccactctgtcatatgtataaatgaagtactgttcaaacatgatgagatgtttatatgttggcatagtagtgagatcgacgtttggtaatggcaatgtattaagattaactccataatgtctagcagcatctgcgatgttataagcgtcgtcaaagcggggtcgatcttgtattgttatatattgtctaacacctataagattatcaaaatcttgtctgcttaatacaccgttaacaatttttgccttgaattcttttattggtgcattaataacatccttatagaggatgttaaacaaataagtgttatcaaagttaagatctggatatttcttttctgctagaacatccattgagtcggagccatctggtttaatataaccaccgataaatctagctctgtattctgtatccgtcaatctaatattaagaaggtgttgagtgaaaggtggaagatcgtaaaagctgtgagtattaatgataggattagtttccgaactaatgttaattggggtattaataatatctatatttccagcgttaagtgtaacattaaacagttttaattcacgtgacgtggtatcaattaaataattaatgcccaatttggatatagcagcctgaagctcatcttgtttagttacggatcctaatgagttattaagcaatatatcgaacggatgaacgaaggttgttttaagttggtcacatactttgtaatctagacatagatgcggaagaacggtagaaactatacgaaataaatattcagagtcctctaattgatcaagagtaactattgacttaataggcatcatttatttagtattaaatgacgaccgtaccagtgacggatatacaaaacgatttaattacagagttttcagaagataattatccatctaacaaaaattatgaaataactcttcgtcaaatgtctattctaactcacgttaacaacgtggtagatagagaacataatgccgccgtagtgtcatctccagaggaaatatcctcacaacttaatgaagatctatttccagatgatgattcaccggccactattatcgaacgagtacaacctcatactactattattgacgatactccacctcctacgtttcgtagagagttattaatatcggaacaacgtcaacaacgagaaaaaagatttaatattacagtatcgaaaaatgctgaagcaataatggaatctagatctatgataacttctatgccaacacaaacaccatccttgggagtagtttatgataaagataaaagaattcagatgttagaggatgaagtggttaatcttagaaatcaacgatctaatacaaaatcatctgataatttagataattttaccaaaatactatttggtaagactccgtacaaatcaacagaagttaataagcgtatagccatcgttaattatgcaaatttgaacgggtcccccttatcagtcgaggacttggatgtttgttcggaggatgaaatagatagaatctataaaacgattaaacaatatcacgaaagtagaaaacgaaaaattatcgtcactaacgtgattattattgtcataaacattatcgagcaggcattgctaaaactcggatttgaagaaatcaaaggactgagtaccgatatcacttcagaaattatcgatgtggagatcggagatgactgcgatgctgtagcatctaaactaggaatcggtaacagtccggttcttaatattgtattgtttatactcaagatattcgttaaacgaattaaaattatttaatttaatacattcccatatccagacaacaatcgtctggattaatctgttcctgtcgtctcataccggacgacatattaatctttttattagtgggcatctttttagatggtttctttttcccagcattaactgagtcgatacctagaagatcgtgattgatctctccgaccattccacgaacttctaattggccgtctctgacggtaccataaactattttaccagcattagtaacagcttggacaatctgaccatccatcgcattgtacgatgtagtagtaactgttgttctacgtctaggagcaccagaagtatttttggagcccttggatgttgatgtagaagaagacgaggattttgattttggtttacatgtaatacattttgaactctttgattttgtatcacatgcgccggcagtcacatctgtttgagaattaagattattgttgcctcctttgacggctgcatctccaccgatttgcgctagtagatttttaagctgtggtgtaatcttattaactgtttcgatataatcatcgtaactgcttctaacggctaaattttttttatccgccatttagaagctaaaaatatttttatttatgcagaagatttaactagattatacaatgaactaatatgatccttttccagattatttacaaacttggtattttttggttctggaggaggcgaatttaaattcggacttggattcggattttgtaagttcttgatcttattatacatcgagtataggatggcgacagtaactgctacacaaataccgatcaaaagaagaataccaatcatttattgacaataacttcactattgatcaagtatgcaatatatcatcttttcactaaataagtagtaataatgattcaacaatgtcgagatatatggacgataataatttagttcatggaaatatcgctatgattggtgtgaatgactccgctaactctgtggggtgcgcagtgctttccccacatagaataaattagcattccgactgtgataataataccaagtataaacgccataatactcaatactttccatgtacgagtgggactggtagacttactaaagtcaataaaggcgaagatacacgaaagaatcaaaagaatgattccagcgattagcacgccggaaaaataatttccaatcataagcatcatgtccatttaactaataaaaattttaaatcgccgaatgaacaaagtggaatataaaccatataaaaacaatagtttgtactgcaaaaataatatctatttttgttttcgaagatatggtaaaattaaatagtagtacacagcatgttataactaacagcagcaacggctcgtaattacttatcatttactagacgaaaaggtggtgggatattttcttgctcaaataatacgaatatatcacccatccattttatgcgatgtttatatactctaatctttaatagatctatagacgacgggtttaccaacaatatagattttatcgattcatctaatttaaacccttccttaaacgtgaatgatctattatctggcataacgatgaccctacctgatgaatcggacaatgtactgggccatgtagaataaattatcaacgaattatcgtctacgaacatttatatcatttgttttaattttaggacgcgaataaatggatataaaatagaaaataacagatattacaaccagtgttatggccgcgcccaaccaggtaggcagttttattttatcttttactacaggttctcctggatgtacgtcaccaacggcggacgtagttctagtacaattagacgtaagttccgcttgggaattttttaacgctaaagagttaacgttaatcgtgcacccaacgtatttacatctagttcgttgaacatcttgattataatataaccattttctatctctagattcgtcagtgcactcatgtaaccaacataccctaggtcctaaatatttatctccggaattagattttggataattcgcgcaccaacaatttctatttcctttatgatcgttacaaaagacgtataatgccgtatccccaaaagtaaaataatcaggacgaataattctaataaactcagaacaatatctcgcatccatatgtttggagcaaatatcggaataagtagacatagccggtttccgttttgcacgtaaccattctaaacaattggggtttccaggatcgtttctacaaaatccagtcatgaaatcgtcacaatgttctgtcttgtaattattattaaatatttttggacagtgtttggtatttgtcttagaacaacattttgccacgctatcactatcgcccaggagataatccttttttataaaatgacatcgttgcccggatgctatataatcagtagcgtgttttaaatccttaatatattcaggagttacctcgttctgataatagattaatgatccaggacgaaatttgaaagaactacatggttctccatgaattaatacatattgtttagcaaattcaggaactataaaactactacaatgatctatcgacataccatctatcaaacaaaacttgggtttaatttctcccggagatgtttcataatagtacgtataactttcttctgcaaacttaacagctctattatattcaggataattaaaacctaattccatatatttgtctcgtatatctgctattcctggtgctattttgattctattaagagtaacagctgcccccattcttaataatcgtcagtatttaaactgttaaatgttggtatatcaacatctaccttatttcccgcagtataaggtttgttgcaggtatactgttcaggaatggttacatttatacttcttctatagtcctgtctttcgatgttcatcacatatgcaaagaacagaataaacaaaataatgtaagaaataatattaaatatctgtgaattcgtaaatacattgattgccataataattacagcagctacaatacacacaatagacattcccacagtgttgccattacctccacgatacatttgagttactaagcaataggtaataactaagctagtaagaggcaatagaaaagatgagataaatatcatcaatatagagattagaggagggctatatagagccaagacgaacaaaatcaaaccgagtaacgttctaacatcattatttttgaagattcccaaataatcattcattcctccataatcgttttgcatcatacctccatctttaggcataaacgattgctgctgttcctctgtaaataaatctttatcaagcactccagcacccgcagagaagtcgtcaagcatattgtaatatcttaaataactcatttatatattaaaaaatgtcactattaaagatggagtataatctttatgccgaactaaaaaaaatgacttgtggtcaacccctaagtctttttaacgaagacggggatttcgtagaagttgaaccgggatcatcctttaagtttctgatacctaagggattttacgcctctccttccgtaaagacgagtctagtattcgagacattaacaacgaccgataataaaatcactagtatcaatccaacaaatgcgccaaagttatatcctcttcaacgcaaagtcgtatctgaagtagtttctaatatgaggaaaatgatcgaatcaaaacgtcctctatacatcactcttcacttggcgtgtggatttggtaagactattaccacgtgttatcttatggctacacacggtagaaaaaccgtcatttgcgtacccaataaaatgttaatacatcaatggaagacacaggtagaggcagtcggattggaacataagatatccatagatggagtaagtagtctattaaaggaactaaagactcaaagtccggatgtattaatagtagtcagtagacatctgacaaacgatgccttttgtaaatatatcaataagcattatgatttgttcatcttggatgaatcacatacgtataatctgatgaacaatacagcagttacaagatttttagcgtattatcctccgatgatgtgttattttttaactgctacacctagaccatctaaccgaatttattgtaacagtattattaatattgccaagttatccaatctaaaaaaaactatctatgcagtagatagtttttttgagccatattccacagataatattagacatatggtaaaacgactagatggaccatctaataaatatcatatatataccgagaagttattatctgtagacgagcctagaaatcaacttattcttgataccctggtagaagaattcaagtcaggaactattaatcgcattttagttattactaaactacgtgaacatatggtattattctacaaacgattattagattttttcggaccagaggttgtatttataggagacgcccaaaatagacgtactccagatatggtcaaatcaatcaaggaactaaatagatttatattcgtatccaccttattttattccggtactggtttagatattcctagtttggattcgttgttcatttgctcggcagtaatcaacaatatgcaaatagagcaattactagggagggtatgtcgagaaacagaactattagataggacggtatatgtatttcctaacacatccatcaaagaaataaagtacatgataggaaatttcatgcaacgaattattagtctgtctgtagataaactaggatttaaacaaaaaagttatcggaaacatcaagaatccgatcccacttctgcatgtacaacatcatccagagaagaacgtgtattaaatagaatatttaactcgcaaaatcgttaagaagtttaagcgacgatccgcatgctgcgcaggccagtgtattacccctcatagtattaatataatccaatgatacttttgtgatgtcggaaatcttaaccaatttagactgacaggcagaacacgtcatgcaatcatcatcgtcatcgataactgtagtcttgggcttctttttgcgactcttcattccggaacgcacattggtgctatccatttaggtagtaaaaaataagtcagaatatgccctataacacgatcgtgcaaaacctggtatatcgtctctatctttatcacaatatagtgtatcgacatttttattattattgacctcgtttatcttggaacatggaatgggaacatttttgttatcaacggccatctttgccttaattccagatgttgtaaaattataactaaacagtctatcatcgacacaaatgaaattcttgtttagacgtttgtagtttacgtatgcggctcgttcgcgtctcattttttcagatattgcaggtactataatattaaaaataagaatgaaataacataggattaaaaataaagttatcatgacttctagcgctgatttaactaacttaaaagaattacttagtctgtacaaaagtttgagattttcagattctgcggctatagaaaagtataattctttggtagaatggggaacatctacttactggaaaataggcgtgcaaaaggtagctaatgtcgagacgtcaatatctgattattatgatgaggtaaaaaataaaccgtttaatattgatccgggctattacattttcttaccggtatattttgggagcgtctttatttattcgaagggtaaaaatatggtagaacttggatctggaaactcttttcaaataccagatgatatgcgaagtgcgtgtaacaaagtattagacagcgataacggaatagactttctgagatttgttttgttaaacaatagatggataatggaagatgctatatcaaaatatcagtctccagttaatatatttaaactagctagtgagtacggattaaacatacccaaatatttagaaattgaaatagaggaagacacattatttgacgacgagttatactctattatagaacgctctttcgatgataaatttccaaaaatatccatatcgtatattaagttgggagaacttagacggcaagttgtagactttttcaaattctcattcatgtatattgagtccatcaaggtagatcgtataggagataatatttttattcctagcgttataacaaaatcaggaaaaaagatattagtaaaagatgtagaccatttaatacgatccaaggttagagaacatacatttgtaaaagtaaaaaagaaaaacacattttccattttatacgactatgatggaaacggaacagaaactagaggagaagtaataaaacgaattatagacactataggacgagactattatgttaacggaaagtatttctctaaggttggtagtgcaggcttaaagcaattgactaataaattagatattaatgagtgcgcaactgtcgatgagttagttgatgagattaataaatccggaactgtaaaacgaaaaataaaaaaccaatcagcatttgatttaagcagagaatgtttgggatatccagaagcggattttataacgttagttaataacatgcggttcaaaatagaaaattgtaaggttgtaaatttcaatattgaaaatactaattgtttaaataacccgagtattgaaactatatatggaaactttaaccagttcgtctcaatctttaatgtcgtcaccgatgtcaaaaaaagattattcgagtgaaataatatgcgcctttgatataggtgcaaaaaatcctgccagaactgttttagaagtcaaggataactccgttagggtattggatatatcaaaattagactggagttctgattgggaaaggcgcatagctaaagatttgtcacaatatgaatacactacagttcttctagaacgtcagcctagaaggtcgccgtatgttaaatttatctattttattaaaggctttttatatcatacatcggctgccaaagttatttgcgtctcgcctgtcatgtctggtaattcatatagagatcgaaaaaagagatcggtcgaagcatttcttgattggatggacacattcggattgcgagactccgttccggatagacgcaaattagacgatgtagcggatagtttcaatttggctatgagatacgtattagataaatggaatactaattatacaccttataataggtgtaaatctagaaattacataaaaaaaatgtaataacgttagtaacgccattatggataatctatttacctttctacatgaaatagaagatagatatgccagaactatttttaactttcatctaataagttgcgatgaaataggagatatatatggtcttatgaaagaacgcatttcctcagaggatatgtttgataatatagtgtataataaagatatacatcctgccattaagaaactagtgtattgcgacatccaacttactaaacacattattaatcagaatacgtatccggtatttaacgattcttcacaagtgaaatgttgtcattatttcgacataaactcagataatagcaatattagctctcgtacagtagagatatttgagagggaaaagtcatctcttgtatcatatattaaaactaccaataagaagagaaaggtcaattacggcgaaataaagaaaactgttcatggaggcactaatgcaaattacttttccggtaaaaagtctgacgagtatctgagtactacagttagatccaacattaatcaaccttggatcaaaaccatctctaagaggatgagagttgatatcattaatcactctatagtaacgcgtggaaaaagctctatattacaaactatagaaattatttttactaatagaacatgtgtgaaaatattcaaggattctactatgcacattattctatccaaggacaaggatgaaaaggggtgtatacacatgattgacaaattattctatgtctattataatttatttctgttgttcgaagatatcatccaaaacgagtactttaaagaagtagctaatgttgtaaaccacgtactcacggctacggcattagatgagaaattattcctaattaagaaaatggctgaacacgatgtttatggagttagcaatttcaaaatagggatgtttaacctgacatttattaagtcgttggatcataccgttttcccctctctgttagatgaggatagcaaaataaagttttttaaggggaaaaagctcaatattgtagcattacgatctctggaggattgtataaattacgtgactaaatccgagaatatgatagaaatgatgaaggaaagatcgactattttaaatagcatagatatagaaacggaatcggtagatcgtctaaaagaattgcttctaaaatgaaaaaaaacactaattcagaaatggatcaacgactagggtataagtttttggtgcctgatcctaaagccggagttttttatagaccgttacatttccaatatgtatcgtattctaattttatattgcatcgattgcatgaaatcttgaccgtcaagcggccactcttatcgtttaagaataatacagaacgaattatgatagaaattagcaatgttaaagtgactcctccagattactcacctataatcgcgagtattaaaggtaagagttatgacgcattagccacgttcactgtaaatatctttaaagaggtaatgaccaaagagggtatatccatcactaaaataagtagttatgagggaaaagattctcatttgataaaaattccgctactaataggatacgggaataaaaatccacttgatacagccaagtatcttgttcctaatgtcataggtggagtctttatcaataaacaatctgtcgaaaaagtaggaattaatctagtagaaaagattacaacatggccaaaatttagggttgttaagccaaactcattcactttctcgttttcctccgtatcccctcctaatgtattaccgacaagatatcgccattacaagatatctctggatatatcacaattggaagcgttgaatatatcatcgacaaagacatttataacggtcaatattgttttgctgtctcaatatttatctagagtgagtctagaattcattagacgtagtttatcatacgatatgcctccagaagttgtctatctagtaaacgcgataatagatagtgctaaacgaattactgaatctattactgactttaatattgatacatacattaatgacctggtggaagctgaacacattaaacaaaaatctcagttaacgatcaacgagttcaaatatgaaatgctgcataactttttacctcatatgaactatacacccgatcaactaaagggattttatatgatatctttactaagaaagtttctctactgtatcttccacacttctagatatccagatagagattcgatggtttgtcatcgcatcctaacgtacggcaaatattttgagacgttggcacatgatgaattagagaattacataggcaacatccgaaacgatatcatgaacaatcacaagaacagaggcacttacgcggtaaacattcatgtactaacaactcccggacttaatcacgcgttttctagcttattgagtggaaagttcaaaaagtcagacggtagttatcgaacacatcctcactattcatggatgcagaatatttctattcctaggagtgttggattttatccggatcaagtaaagatttcaaagatgttttctgtcagaaaataccatccaagtcaatatctttacttttgttcatcagacgttccggaaagaggtcctcaggtaggtttagtatctcaattgtctgtcttgagttccattacaaatatactaacgtctgagtatttggatttggaaaagaaaatttgtgagtatatcagatcatattataaagatgatataagttactttgaaacaggatttccaatcactatagaaaatgctctagtcgcatctcttaatccaaatatgatatgtgattttgtaactgactttagacgtagaaaacggatgggattcttcggtaacttggaggtaggtattactttagttagggatcacatgaatgaaattcgcattaatattggagcgggaagattagtcagaccattcttggttgtggataacggagagctcatgatggatgtgtgtccggagttagaaagcagattagacgacatgacattctctgacattcagaaagagtttccgcatgtcatcgaaatggtagatatagaacaatttacttttagtaacgtatgtgaatcggttcaaaaatttagaatgatgtcaaaggatgaaagaaagcaatacgatttatgtgactttcctgccgaatttagagatggatatgtagcatcttcattagtgggaatcaatcacaattctggacccagagctattcttggatgtgctcaagctaaacaagctatctcttgtctgagctcggatatacgaaataaaatagacaatggaattcatttgatgtatccagagaggccaatcgtgattagtaaggctttagaaacttcaaagattgcggctaattgcttcggccaacatgttactatagcattaatgtcgtacaaaggtatcaatcaagaggatggaattatcatcaaaaaacaatttattcagagaggcggtctcgatattgttacagccaagaaacatcaagtagaaattccattggaaaactttaataacaaagaaagagataggtctaacgcctattcaaaattagaaagtaatggattagttagactgaatgctttcttggaatccggagacgctatggcacgaaatatctcatcaagaactcttgaagatgattttgctagagataatcagattagcttcgatgtttccgagaaatataccgatatgtacaaatctcgcgttgaacgagtacaagtagaacttactgacaaagttaaggtacgagtattaaccatgaaagaaagaagacccattctaggagacaaatttaccactagaacgagtcaaaagggaacagtcgcgtatgtcgcggatgaaacggaacttccatacgacgaaaatggtatcacaccagatgtcattattaattctacatccatcttctctagaaaaactatatctatgttgatagaagttattttaacagccgcatattctgctaagccgtacaacaataagggagaaaaccgacctgtctgttttcctagtagtaacgaaacatccatcgatacatatatgcaattcgctaaacaatgttatgagcattcaaatccgaaattgtccgatgaagaattatcggataaaatcttttgtgaaaagattctctatgatcctgaaacggataagccttatgcatccaaagtattttttggaccaatttattacttgcgtctgaggcatttaactcaggacaaggcaaccgttagatgtagaggtaaaaagacgaagctcattagacaggcgaatgagggacgaaaacgtggaggaggtatcaagttcggagaaatggagagagactgtttaatagcgcatggtgcagccaatactattacagaagttttgaaagattcggaagaagattatcaagatgtgtatgtttgtgaaaattgtggagacatagcagcacaaatcaagggtattaatacatgtcttagatgttcaaaacttaatctctctcctctcttaacaaaaattgataccacgcacgtatctaaagtatttcttactcaaatgaacgccagaggcgtaaaagtcaaattagatttcgaacgaaggcctccttcgttttataaaccattagataaagttgatctcaagccgtcttttctggtgtaatattctagtttggtagtagatacatatcaatatcatcaaattcgagatccgaattataaaatgggcgtggattgttaactatagaatcggacgtctgatattcgaaaatctgtggagtttcaggttttggtggaggtgtaactgctacttgggatactgaagtctgatattcagaaagctgtggatgttctggttcggcatccaccgatggtgtcacatcactaatcggttcggtaacgtctgtggatggaggtgctacttctacagaacctgtagcctcagttgtcaacggagatacatttttaatgcgagaaaatgtataatttggtaatggtttcttatgtggatctgaagaagaggtaagatatctactagaaagataccgatcacgttctagttctcttttgtagaacttaactttttctttctccgcatctagttgatattccaacctcttcacgttactacgttcagattccaattcacgttcgcatgggttacctccgcagtttttacgagcgatttcacgttcagccttcatgcgtctctccctctctctatcgagtttatcagagcagtctttctgaaggcgatcgaactccataaatttctccaacgctttgattgtttccatagatttccgaagttcagcttttaggactgtgattctttttctttcgaattcacagctggatgtacaaccgtttccattaccgccatctctaagtttcttttctagatcggcaacatttcatccccatgccttttacattcctcgagtctactgtcgtcgaaatatcgttccagctccttttcgacatcaataactttagcacgttgtctctcaagctctcttttgtagttatctgattccctggcacgtttaagatcttcatgcaattgagtcagctcttaacttcctctcttgcttcttcgtcatagtacgcgcaatcactgtgagatccattgttaccacgtctacactcggcgagctcgcgtttaagagattcaatttcccgtttgtattggtccatgtttccattgctaccaccattagatttacaggctgctagttgtcgttcgagatcagaaatacgggttttcttggaattgatttcgtcgatgtacttggcatcgaaacacttattaagttctttttccaattctacgattttatttctttcgcgagtcaattccctcctgtagtaactatctgttttgtcagattcacgctctctacgtagactttcttgcaagttactaatttgttccctagcacgtccgagtttagttttatatgctgaatagagttctgattcatcctttgagcagatctctagcgatcgtttaagattcctaattctagtctttagcctatttacctcctcagaagatgttccgttaccgttgcgtttacactcgttaagctgtctatcaagatccatgattctatctctaagacgttgcatctctctttccatatcagcattgctttcattattacgtctgcagtcactcaactgtctttcaatatctgagattctatctctaagacgtcgcatctctctctgtttcggcattggtttcattattacgtttacagtcgttcaactgtctttcaagatctgatattctagattggagtctgctaatctctgtagcattttcacggcattcactcagttgtctttcaagatctgaaattttagattggagtctgctaatctctgtaagatttcctcctccgctctcgatgcagtcggtcaacttattctctagttctctaatacgcgaacgcagtgcatcaacttcttgcgtgtcttcctggttgcgtgtacattcatcgagatctctaacgcgtcgtcgttcttcctcaagttctctgcgtactacagaaagcgtgtccctatcttgttgatatttagcaatttctgattctagagtactgattttgcttacgtagttactaatagttgtcttggccttatcaagatcctccttgtatttgtcgcattccttgatatccctacgaagtctggacagttcccattcgacattacgacgtttatcgatttcagctcggagatcgtcatcgcgttgttttagccacatacgactgagttcaagttctcgttgacaagatccatctacttttccattcctaatagtatccagttccttttctagttctgaacgcatttctcgttccctatcaagcgattctctcaattctcggatagtcttcttatcaatttctaataaatctgaaccatcatctgtcccattttgaatatccctgtgttctttgatctcttttgtaagtcggtcgattctttcggttttataaacagaatccctttccaaagtcctaatcttactgagtttatcactaagttctgcattcaattcggtgagttttctcttggcttcttccaactctgttttaaactctccactatttccgcattcttcctcgcatttatctaaccattcaattagtttattaataactagttggtaatcagcgattcctatagccgttcttgtaattgtgggaacataattaggatcttctaatggattgtatggcttgatagcatcatctttatcattattagggggatggacaaccttaattggttggtcctcatctcctccagtagcgtgtggttcttcaataccagtgttagtaataggcttaggcaaatgcttgtcgtacgcgggcacttcctcatccatcaagtatttataatcgggttctacttcagaatattcttttctaagagacgcgacttcgggagttagtagaagaactctgtttctgtatctatcaacgctggaatcaatactcaagttaaggatagcgaatacctcatcgtcatcatccgtatcttctgaaacaccatcatatgacatttcatgaagtctaacgtattgataaatagaatcagatttagtattaaacagatccttaacctttttagtaaacgcatatgtatattttagatctccagatttcataatatgatcacatgccttaaatgtcagtgcttccatgatataatctggaacactaatgggtgacgaaaaagatacagcaccatatgctacgttgataaataaatctgaaccactaagtagataatgattaatgttaagaaagaggaaatattcagtgtataggtatgtcttggcgtcatatcttgtactaaacacgctaaacagtttgttaatgtgatcaatttccaatagattaattagagcagcgggaataccaacaaacatattaccacatccgtattttctatgaatatcacatatcatgttaaaaaatcttgatagaagagcgaatatctcgtctgacttaatgagtcgtagttcagcagcaacataagtcataactgtaaatagaacatactttcctgtagtgttgattctagactccacatcaacaccattattaaaaatagttttatatacatctttaatctgctctccgttaatcgtcgaacgttctagtatacggaaacactttgatttcttatctgtagttaatgacttagtgatatcacgaagaatattacgaattacatttcttgtttttcttgagagacctgattcagaactcaactcatcgttccatagtttttctacctcagtggcgaaatctttggagtgcttggtacatttttcaataaggttcgtgacctccatttattataaaaaatttattcaaaacttaactacaatcgggtaattataagatcgtagatctcccatgtggcggaatactaccatctatcgcatgtggatggacagtaggtaatggccatgggaacagtaatgtttgcatatttatctttcttgctagtattactgcatattgtcccaatgtttcgatgtgatgttctaacctatcaactgccgctgtatcacaacaatagtgtccgatgaaattaagattatgatccaatgtgtttaatatatgattatcaagtcttatacgatccgcgtcttttttgacaggatcaggttcttctacaggaagaagtttcggcctcttatgatattcatgtctgggaaacggtggtctagggtgaggctccggtatcggagtgggttttggattataatcatcatcgtctatgacatcatcttcgacttcgatatttattttgctatcttgatgatgtcctgtatcagttgcattttcagcactcgactgaatattagcgcattcattgtctattattaccatatttctaaacccaaaatgtatgtgttgaacatcagtactatcgttgatgagtcttatagcatgaattcgcttatcgttatcgggtttatcttctgtcaccttagcaattccttttttattaaactctacataatcatatccatttctattgtttgttctaatataaacgagtatagcatcattgctaaatttttcaatagtatcaaaaacagaatatcctaaaccatataatatatattcaggaacactcaaactaaatgtccaggattctcctaaatacgtaaactttaatagtgcgaaatcattcaaaaatctaccacttatagatagatagtacataaatgcgtatagtagtctacctatctctttattatgaaaaccggcattacgatcatatatgtcgtgatatacctgtgatccgtttacgttaaaccataaatacatgggtgatcctataaacatgaatttatttctaattctcagagctatagttaattgaccgtgtaatatttgcttacatgcatacttgatacgcttattaataagatttttatcattgctcgttatttcagaatcgtatatataaggagtaccatcgtgattcttaccagatattatacaaaatactatatataaaatatattgacccacgttagtaatcatataaatgtttaacgttttaaattttgtattcaatgatccattatcatacgctatcatggtcttgtaatattcattctttaaaatataatattgtgttagccattgcattggagctcctaatggagattttctattctcatccattttaggataggctttcataaagtccctaataacttcgtgaataatgtttctatgttttctactgatgcatgtatttgcttcgatttttttatcccatgtttcatctatcatagatttaaacgcagtaatgctcgcaacattaacatcttgaaccgttggtacaattccgttccataaatttataatgttcgccatttatataactcattttttgaatatacttttaattaacaaaagagttaagttactcatatggacgccgtccagtctgaacatcaatctttttagccagagatatcatagccgctcttagagtttcagcgtgattttccaacctaaatagaacttcatcgttgcgtttacaacacttttctatttgttcaaactttgttgttacattagtaatctttttttccaaattagttagccgttgtttgagagtttcctcattgtcgtcttcatcggctttaacaattgcttcgcgtttagcctctggctttttagcagcctttgtagaaaaaaattcagttgctggaattgcaagatcgtcatctccggggaaaagagttccgtccatttaaagtacagattttagaaactgacactctgcgttatttatatttggtacaacacatggattataaatattgatgttaataacatcagaaaatgtaaagtctatacattgttgcatcgtgttaaattttctaatggatctagtattattgggtccaacttctgcctgaaatccaaatatggaagcggatacaaaaccgtttcctggataaaccacacatctccacttttgctttacatcagaaattgtgtcgttgacatcttgaactctcctatctaatgccggtgttccacctatagattttgaatattcgaatgctgcatgagtagcattaaattccttaatattgccataattttcatatattgagtaaccctggataaaaagtaaacacaccgcagccgtcgctaccacaataaaaaaaattgatagagagttcatttataatctattagaagctgacaaaatttttttacacgcatcagacaatgctttaataaatagttcaacatctacttttgtcatatcgaaccgatggtatgattctaacctagaattacatccgaaaaagttgactatgttcatagtcattaagtcattaacaaacaacattccagactctggattataagacgatactgtttcgtcacaattacctaccttaatcatgtgattatgaatattggctattagagcaccttctaagaaatctataatatctttgaaacacgatttaaaatcaaaccacgaatatacttctacgaagaaagttagtttacccataggagaaataactataaatggagatctaaatacaaaatccggatctatgatagttttaacattattatattctctattaaatacctccacatctaaaaatgttaattttgaaactatgtcttcgtttattaccgtacctgaactaaacgctataagctctattgtttgagaactctttaaacgatattcttgaaatacatgtaacaaagtttcctttaactcggtcggtttatctaccatagttacagaatttgtatccttatctataatataataatcaaaatcgtataaagttatataattatcgcgttcagattgtgatcttttcaaatagactaaaaaccccatttctctagtaagtatcttatgtatatgtttgtaaaatatcttcatggtgggaatatgctctaccgcagttagccattcctcattgacagcggtagatgtattagacaaaactattccaatgtttaacaagggccattttacgagattattaaatccttgtttgataaatgtagccaatgagggttcgagttcaacgacgattgaattctcttcccgcggatgctgcatgatgaacgacgggatgttgttcgattgatttggaattctttttcgactttttgtttatattaaatattttaaaatttatagcggatagcaattcatgtaccacggataatgtagacgcgtattgcgcatcgatatctttattattagataaatttatcaataaatgtgagaagtttgcctcgttaaggtcttccatttaaatattatataaacatttgtgtttgtatcttattcgtcttttatggaatagttttttactagtaaagctgcaattacacactttgtccgtaaaacataaatataaacaccagcttttatcaatcgttccaaaaagtcgacggcggacatttttaacatggcatctattttaaatacacttaggtttttggaaaaaacatcattttataattgtaacgattcaataactaaagaaaagattaagattaaacataagggaatgtcatttgtattttataagccaaagcattctaccgttgttaaatacttgtctggaggaggtatatatcatgatgatttggttgtattggggaaggtaacaattaataatctaaagatgatgctattttacatggatttatcatatcatggagtgacaagtagtggagcaatttacaaattgggatcgtctatcgatagactttctctaaataggactattgttacaaaagttaataattatgatgatacattttttgacgacgatgattgatcgctattgcacaattttgtttttgtactttctaatatagtgtttaggttctttttcatatgagaatattgatttactaaaatatctatgtttaacttttgttctatgacgtccttatcggcggtatcggtacatatacgtaattcaccttcacaaaatacggagtcttcgataataatagccaatcgattattggatctagctgtctgtatcatattcaacatgtttaatatatcctttcgtttcccctttacaggcatcgatcgtagcatattttccgcgtctgatatggaaatgttaaaactacaaaaatgcgtaatgttagcccgtcctaatattggtacgtgtctataagtttggcatagtagaataatagacgtgtttaaatgccttccaaagtttaagaattctattagagtattgcattttgatagtttatcgcctacatcatcaaaaataagtaaaaagtgtgctgattttttatgattttgtgcgacagcaatacatttttctatgttacttttagttcgtatcagattatattctagagattcctgactactaacgaaattaatatgatttggccaaatgtatccatcataatctgggttataaacgggtgtaaacaagaatatatgtttatattttttaactagtgtagaaaacagagatagtaaatagatagtttttccagatccagatcctcctgttaaaaccattctaaacggcatttttaataaattttctcttgaaaattgtttttcttggaaacaattcataattatatttacagttactaaattaatttgataataaatcaaaatatggaaaactaaggttgttagtagggaggagaacaaagaaggcacatcgtgatataaataacatttattatcatgatgacaccagaaaacgacgaagagcagacatctgtgttctccgctactgtttacggagacaaaattcagggaaagaataaacgcaaacgcgtgattggtctatgtattagaatatctatggttatttcactactatctatgattaccatgtccgcgtttctcatagtgcgcctaaatcaatgcatgtctgctaacgaggctgctattactgacgccgctgttgccgttgctgctgcatcatctactcatagaaaggttgcgtctagcactacacaatatgatcacaaagaaagctgtaatggtttatattaccagggttcttgttatatattacattcagactaccagttattctcggatgctaaagcaaattgcactgcggaatcatcaacactacccaataaatccgatgtcttgactacctggctcattgattatgttgaggatacatggggatctgatggtaatccaattacaaaaactacatccgattatcaagattctgatgtatcacaagaagttagaaagtatttttgtgttaaaacaatgaactaatatttatttttgtacattaataaatgaaatcgcttaatagacaaactgtaagtaggtttaagaagttgtcggtgccggccgctataatgatgatactctcaaccattattagtggcataggaacatttctgcattacaaagaagaactgatgcctagtgcttgcgccaatggatggatacaatacgataaacattgttatttagatactaacattaaaatgtctacagataatgcggtttatcagtgtcgtaaattacgagctagattgcctagacctgatactagacatctgagagtattgtttagtattttttataaagattattgggtaagtttaaaaaagaccaatgataaatggttagatattaataatgataaagatatagatattagtaaattaacaaattttaaacaactaaacagtacgacggatgctgaagcgtgttatatatacaagtctggaaaactggttaaaacagtatgtaaaagtactcaatctgtactatgtgttaaaaaattctacaagtgacaacaaaaaatgaattaataataagtcgttaacgtacgccgccatggacgccgcgtttgttattactccaatgggtgtgttgactataacagatacattgtatgatgatctcgatatctcaatcatggactttataggaccatacattataggtaacataaaaactgtccaaatagatgtacgggatataaaatattccgacatgcaaaaatgctactttagctataagggtaaaatagttcctcaggattctaatgatttggctagattcaacatttatagcatttgtgccgcatacagatcaaaaaataccatcatcatagcatgcgactatgatatcatgttagatatagaagataaacatcagccattttatctattcccatctattgatgtttttaacgctacaatcatagaagcgtataacctgtatacagctggagattatcatctaatcatcaatccttcagataatctgaaaatgaaattgtcgtttaattcttcattctgcatatcagacggcaatggatggatcataattgatgggaaatgcaatagtaattttttatcataaaagttgtaaagtaaataataaaacaataaatattgaactagtagtacgtatattgagcaatcagaaatgatgctggtacctcttatcacggtgaccgtagttgcgggaacaatattagtatgttatatattatatatttgtaggaaaaagatacgtactgtctataatgacaataaaattatcatgacaaaattaaaaaagataaagagttctaattccagcaaatctagtaaatcaactgatagcgaatcagactgggaggatcactgtagtgctatggaacaaaacaatgacgtagataatatttctaggaatgagatattggacgatgatagcttcgctggtagtttaatatgggataacgaatccaatgttatggcgcctagcacagaacacatttacgatagtgttgctggaagcacgctgctaataaataatgatcgtaatgaacagactatttatcagaacactacagtagtaattaatgaaacggagactgttgaagtacttaatgaagataccaaacagaatcctaactattcatccaatcctttcgtaaattataataaaaccagtatttgtagcaagtcaaatccgtttattacagaacttaacaataaatttagtgagaataatccgtttagacgagcacatagcgatgattatcttaataagcaagaacaagatcatgaacacgatgatatagaatcatcggtcgtatcattggtgtgattagtttcctttttataaaattgaagtaatatttagtattattgctgccgtcacgttgtacaaatggagatattccctgtattcggcatttctaaaattagcaattttattgctaataatgactgtagatattatatagatacagaacatcaaaaaattatatctgatgagatcaatagacagatggatgaaacggtacttcttaccaacatcttaagcgtagaagttgtaaatgacaatgagatgtaccatcttattcctcatagattatcgacgattatactctgtattagttctgtcggaggatgtgttatctctatagataatgacatcaatggcaaaaatattctaacctttcccattgatcatgctgtaatcatatccccactgagtaaatgtgtcgtagttagcaagggtcctacaaccatattggttgttaaagcggatatacctagcaaacgattggtaacatcgtttacaaacgacatactatatgtaaacaatctgtcactgattaattatttgccgttgtctgtattcattattagacgagtcaccgactatttggatagacacatatgcgatcagatatttgctaataataagtggtattcccttataaccatcgacgataagcaatatcctattccatcaaactgtataggtatgtcctctgccaagtacataaattctagcatcgagcaagatactttaatccatgtttgtaacctcgagcatccgttcgactcagtatacaaaaaaatgcagtcgtacaattctctacctatcaaggaacaaatattgtacggtagaattgataatataaatatgagcattagtatttctgtggattaatagatttctagtatggggatcattaatcatctctaatctctaaatacctcataaaacgaaaaaaaagctattatcaaatactgtacggaatggattcattctcttctctttttatgaaactctgttgtatatctactgataaaactggaagcaaaaaatctgatagaaagaataagaataagatcaaggattatatggaacacgattattataaaataacaatagttcctggttcctcttccacgtctactagctcgtggtattatacacatgcctagtaatagtctctttgcgttgacggaaagcagactagaaataacaggctaaaatgttcagacaccataatagttcccaacccagataataacagagttccatcaacacattcctttaaactcaatcccaaacccaaaaccgttaaaatgtatccggccaattgatagtagataatgaggtgtacagcgcatgataatttacacagtaaccaaaatgaaaatactttagtaattataagaaatatagacggtaatgtcatcatcaacaatccgataatatgcctgagagtaaacattgacggataaaacaaaaatgctccgcataactctatcatggcaataacacaaccaaatacttgtaagattcctaaattagtagaaaatacaacgaatatcgatgtataagtgatctcgagaaataataagaataaagtaatgcccgtaaagataaacatcaacattgtttggtaatcattaaaccaattagtatgaagttgaactaatttcacagtagattttattccagtgttatcctcgcatgtataagtacctggtaagatatctttatattccataatcaatgagacatcactatctgataacgaatgaagtctagcactagtatgccatttacttaatattgtcgtcttggaagttttattataagttaaaatatcatggttatccaatttccatctaatatactttgtcggattatctatagtacacggaataatgatggtatcattacatgctgtatactctatggtctttgtagttgttataacaaccaacgtatagaggtatatcaacgatattctaactcttgacattttttatttatttaaaatgatacctttgttatttattttattctattttgctaacggtattgaatggcataagtttgaaacgagtgaagaaataatttctacttacttattagacgacgtattatacacgggtgttaatggggcggtatacacattttcaaataataaactaaacaaaactggtttaactaataataattatataacaacatctataaaagtagaggatgcggataaggatacattagtatgcggaaccaataacggaaatcccaaatgttggaaaatagacggttcagacgacccaaaacatagaggtagaggatacgctccttatcaaaatagcaaagtaacgataatcagtcacaacggatgtgtactatctgacataaacatatcaaaagaaggaattaaacgatggagaagatttgacggaccatgtggttatgatttattcacggcggataacgtaattccaaaagatggtttacgaggagcattcgtcgataaagacggtacttatgacaaagtttacattcttttcactgatactatcggctcaaagagaattgtcaaaattccgtatatagcacaaatgtgcctaaacgacgaaggtggtccatcatcattgtctagtcatagatggtcgacgtttctcaaagtcgaattagaatgtgatatcgacggaagaagttatagacaaattattcattctagaactataaaaacagataatgatacgatactatatgtattcttcgatagtccttattccaagtccgcattatgtacctattctatgaataccattaaacaatctttttctacgtcaaaattggaaggatatacaaagcaattgccgtctccagctcctggtatatgtttaccagctggaaaagttgttccacataccacgtttgaagtcatagaacaatataatgtactagatgatattataaagcctttatctaaccaacctatcttcgaaggaccgtctggtgttaaatggttcgatataaaggagaaggaaaatgaacatcgggaatatagaatatacttcataaaagaaaattctatatattcgttcgatacaaaatctaaacaaactcgtagctcgcaagtcgatgcgcgactattttcagtaatggtaactgcgaaaccgttatttatagcagatatagggataggagtaggaatgccacaaatgaaaaaaatacttaaaatgtaatcttaatcgagtacaccacacgacaatgaacaaacataagacagattatgctggttatgcttgctgcgtaatatgcggtctaattgtcggaattatttttacagcgacactattaaaagttgtagaacgtaaattagttcatacaccattaatagataaaacgataaaagatgcatatattagagaagattgtcctactgactggataagctataataataaatgtatccatttatctactgatcgaaaaacctgggaggaaggacgtaatgcatgcaaagctctaaattcaaattcggatctaattaagatagagactccaaacgagttaagttttttaagaagccttagacgaggctattgggtaggagaatccgaaatattaaaccagacaaccccatataattttatagctaagaatgccacgaagaatggaactaaaaaacggaaatatatttgtagcacaacgaatactcccaaactgcattcgtgttacactatataacaattacactacatttttatcataccactacttcggttagatgttttagaaaaaaataaatatcgccgtaccgttcttgtttttataaaaataacaattaacaattatcaaattttttctttaatattttacgtggttgaccattcttggtggtaaaataatctcttagtgttggaatggaatgctgtttaatgtttccacactcatcgtatattttgacgtatgtagtcacatcgtttacgcaatagtcagactgtagttctatcatgcttcctacatcagaaggaggaacagttttaaagtctcttggttttaatctattaccgttagttttcatgaaatcctttgttttatccacttcacattttaaataaatgtccactatacattcttttgttaattttactagatcgtcatgggtcatagaatttataggttccgtagtccatggatccaaactagcaaacttcgcgtatacggtatcgcgattagtgtatacaccaactgtatgaaaattaagaaaacagtttaataaatcaacagaaatatttaatcctccgtttgatacagatgcgccatatttatggatttcggattcacacgttgtttgtctgaggtgttcgtctagtgttgcttctacgtaaacttcgattcccatatattctttattgtcagaatcgcataccgatttatcatcatacactgtttgaaaactaaatggtatacacatcaaaataataaataataacgagtacattctgcaatattgttatcgtaattggaaaaatagtgttcgagtgagttggattatgtgagtattggattgtatattttattttatattttgtaataagaataaaatgctaatgtcaagtttattccaatagatgtcttattaaaaacatatataataaataacaatggctgaatggcataaaattatcgaggatatctcaaaaaataataagttcgaggatgccgccatcgttgattacaagactacaaagaatgttctagctgctattcctaacagaacatttgccaagattaatccgggtgaaattattcctctcatcactaatcgtaatattctaaaacctcttattggtcagaaatattgtattgtatatactaactctctaatggatgagaacacgtatgctatggagttgcttactgggtacgcccctgtatctccgatcgttatagcgagaactcataccgcacttatatttttgatgggtaagccaacaacatccagacgtgacgtgtatagaacgtgtagagatcacgctacccgtgtacgtgcaactggtaattaaaataaaaagtaatattcatatgtagtgtcaattttaaatgatgatgatgaaatggataatatccatattgacgatgtcaataatgccggtattggcatacagttcatcgatttttagatttcattcagaggatgtggaattatgttatgggcatttgtattttgataggatctataatgtagtaaatataaaatataatccgcatattccatatagatataattttattaatcgcacgttaaccgtagatgaactagacgataatgtcttttttacacatggttattttttaaaacacaaatatggttcacttaatcctagtttgattgtctcattatcaggaaacttaaaatataatgatatacaatgctcagtaaatgtatcgtgtctcattaaaaatttggcaacgagtacatctactatattaacatctaaacataagacttattctctacatcggtccacgtgtattactataataggatacgattctattatatggtataaagatataaatgacaagtataatgacatctatgattttactgcaatatgtatgctaatagcgtctacattgatagtgaccatatacgtgtttaaaaaaataaaaatgaactcttaattatgctatgctattagaaatggataaaatcaaaattacggttgattcaaaaattggtaatgttgttaccatatcgtataacttggaaaagataactattgatgtcacacctaaaaagaaaaaagaaaaggatgtattattagcgcaatcagttgctgtcgaagaggcaaaagatgtcaaggtagaagaaaaaaatattatcgatattgaagatgacgatgatatggatgtagaaagcgcgtaatacgatctataaaaataagtatataaatactttttatttactgtactcttactgtgtagtggtgataccctactcgattatttttttaaaaaaaaaatacttattctgattcttctagccatttccgtgttcgtttgaatgccacatcgacgtcaaagataggggagtagttgaaatctagttctgcattgttggtacgcacctcaaatgtagtgttggatatcttcaacgtatagttgttgagtagtgatggttttctaaatagaattctcttcatatcattcttgcacgcgtacatttttagcatccatcttggaatcctagatccttgttctattcccaatggtttcatcaatagaagattaaacatatcgtacgaacacgatggagagtaatcgtagcaaaagtaagcatttcctttaatcttagatcccggatactggatatattttgcagccaacacgtgcatccatgcagcatttcctacatatacccggctatgcaccgcgtcatcatcgactgtacgatacataatgttaccgtgttgcttacattgctcgtaaaagactttcatcaatttgtctccttctccgtaaattccagtgggtcttaggcaacaagtatacaattttgctccattcatgattacggaattattggctttcataaccagttgctcggccatacgtttactttttgcgtatacatgtcctggtgatatatcataaagggtatgctcatggccgatgaatggatcaccgtgtttattgggtcctattgcttccatgctactagtatagatcaaatacttgattcctaggtccacacaagctgccaaaatagtctgtgttccataatagtttactttcatgatttcattatcggtgtattttccaaatacatccactagagcagccgtatgaataatcagatttaccccatctagcgcttctctcaccttatcaaagtcgtttatatcacattgtatatagtttataaccttaactttcgaggttattggttgtggatcttctacaatatctatgactctgatttcttgaacatcatctgcactaattaacagttttactatatacctgcctagaaatccggcaccaccagtaaccgcgtacacggccattgctgccactcataatatcagactacttattctattttactaaataatggctgtttgtataatagaccacgataatatcagaggagttatttactttgaaccagtccatggaaaagataaagttttaggatcagttattggattaaaatccggaacgtatagtttgataattcatcgttacggagatattagtcaaggatgtgattccataggcagtccagaaatatttatcggtaacatctttgtaaacagatatggtgtagcatatgtttatttagatacagatgtaaatatatttacaattattggaaaggcgttatctatttcaaaaaatgatcagagattagcgtgtggagttattggtatttcttacataaatgaaaagataatacattttcttacaattaacgagaatggcgtttgatatatcagttaatgcgtctaaaacaataaatgcattagtttacttttctactcagcaaaataaattagtcatacgtaatgaagttaatgatacacactacactgtcgaatttgatagggacaaagtagttgacacgtttatttcatataatagacataatgacaccatagagataagaggggtgcttccagaggaaactaatattggttgcgcggttagtatgacttacttgtataataagtatagttttaaactgattttagcagaatatataagacacagaaatactatatccggcaatatttattcggcattgatgacactagatgatttggctattaaacagtatggagacattgatctattatttaatgagaaacttaaagtagactccgattcgggactatttgactttgtcaactttgtaaaggatatgatatgttgtgattctagaatagtagtagctctatctagtctagtatctaaacattgggaattgacaaataaaaaatataggtgtatggcattagccgaacatatatctgatagtattccaatatctgagctatctagactacgatacaatctatgtaagtatctacgcggacacactgagagcatagaggataaatttgattattttgaagacgatgattcgtctacatgttctgccgtaaccgacagggaaacggatgtataattttttttatagcgtgaaggatatgataaaaaatataattgttgtatttatcccattccaatcaccttatatgattctgtaacacaataaaggagtcttatagatgtatagaggtcagatactggtttgataaactgtttattccacataagtatgtttgactttatggttagacccgcatactttaacaaatcactgaaaattggagttaggtattgacctctcagaatcagttgccgttctggaacattaaatgtattttttatgatatactccaacgcatttatgtgggcatacaacaagtcattactaatggaatattccaagagttttagttgtctagtatttaacaagagaagagatttcaacagactgtttatgaactcgaatgccgcctcattgtcgcttatattgatgatgtcgaattctcccaatatcatcaccgatgagtagctcatcttgttatcgggatccaagttttctaaagatgtcattaaaccctcgatcatgaatggatttatcatcatcgtttttatgttggacatgagcttagtccgtttgtccacatctatagaagatgatttctgaattatttcatatatctctctctttaactccaggaacttgtcaggatggtctactttaatatgttctcgtctaagagatgaaaatctttggatggttgcacgcgacttttctctaaaggatgacgttgcccaagatcctctcttaaatgaatccatcttatccttggacaagatggacagtctattttccttagatggtttaatatttttgttacccatgatctataaaggtagacctaatcgtctcggatgaccatatatttattttcagttttattatacgcataaattgtaaaaaatatgttaggtttacgaaaatgtctcgtggggcattaatcgtttttgaaggattggacaaatctggaaaaacaacacaatgtatgaacatcatggaatcaataccttcaaacacaataaaataccttaactttcctcagagatccactgtcactggaaagatgatagatgactatctaactcgtaaaaaaacctataatgatcatatagttaatctattattttgtgcaaatagatgggagtttgcatcttttatacaagaacaactagaacagggaattactttaatagttgatagatacgcattttctggagtagcgtatgccgccgctaaaggcgcgtcaatgactctcagtaagagttatgaatctggattgcctaaacccgacttagttatattcttggaatctggtagcaaagaaattaatagaaacgtcggtgaggaaatttatgaagatgttacattccaacaaaaggtattacaagaatataaaaaaatgattgaagaaggagatattcattggcaaattatttcttctgaattcgaggaagatgtaaagaaggagttgattaagaatatagttatagaggctatacacacggttactggaccagtggggcaactgtggatgtaatagtgaaattacattttttataaatagatgttagtacagtgttataaatggatgaagcatattactctggcaacttggaatcagtactcggatacgtgtccgatatgcataccgaactcgcatcaatatctcaattagttattgccaagatagaaactatagataatgatatattaaacaaggacattgtaaattttatcatgtgtagatcaaacttggataatccatttatctctttcctagatactgtatatactattatagatcaagagaactatcagactgagttgattaattcattagacgacaatgaaattatcgattgtatagttaataagtttatgagcttttataaggataacctagaaaatatagtagatgctatcattactctaaaatatataatgaataatccagattttaaaactacgtatgccgaagtactcggttccagaatagccgatatagatattaaacaagtgatacgtaagaatatactacaattgtctaataatatccgcgaacgatatttgtgaaaatattaaaaaaaaatactttttttattaaatgacgtcttttcgtgaatttagaaaattatgctgtgctatatatcacgcatcaggatataaagaaaaatctaaattaattagagactttataacagatagggatgataaatatttgatcattaagctattgcttcccggattagacgatagaatttataacatgaacgataaacaaattataaaattatatagtataatatttaaacaatctcaggaagatatgctacaagatttaggatacggatatataggagacactattaggactttcttcaaagagaacacagaaatccgtccacgagataaaagcattttaactttagaagaagtggatagttttttaactacgttatcatccgtaactaaagaatcgcatcaaataaaattattgactgatgtagcatctgtttgtacatgtaatgatttaaaatgtgtagtcatgcttattgataaagatctaaaaattaaagcgggtcctcggtacgtacttaacgctattagtcctaatgcctatgatgtgtttagaaaatctaataacttgaaagagataatagaaaattcatctaaacaaaatctagactctatatctatttctgttatgactccaattaatcccatgttagcggaatcgtgtgattctgtcaataaggcgtttaaaaaatttccatcaggaatgtttgcggaagtcaaatacgatggtgaaagagtacaagttcataaaaataataacgagtttgccttctttagtagaaacatgaaaccagtactctctcataaagtggattatctcaaagaatacataccgaaagcatttaaaaaagctacgtctatcgtattggattctgaaattgttcttgtagacgaacataatgtaccgctcccgtttggaagtttaggtatacacaaaaagaaagaatataaaaactctaacatgtgtttgttcgtgtttgactgtttgtactttgatggattcgatatgacggacattccattgtacgaacgaagatcttttctcaaagatgttatggttgaaatacccaatagaatagtattctcagagttgacgaatattagtaacgagtctcagttaactgacgtattggatgatgcactaacgagaaaattagaaggattggtcttaaaagatattaatggagtatacgaaccgggaaagagaagatggttaaaaataaagcgagactatttgaacgagggttccatggcagattctgccgatttagtagtactaggtgcctactatggtaaaggagcaaagggtggtatcatggcagtctttctaatgggttgttacgacgatgaatccggtaaatggaagacggttaccaagtgttcaggacacgatgataatacgttaagggagttgcaagaccaattaaagatgattaaaattaacaaggatcccaaaaaaattccagagtggttagtagttaataaaatctatattcccgattttgtagtagaggatccgaaacaatctcagatatgggaaatttcaggagcagagtttacatcttccaagtcccataccgcaaatggaatatccattagatttcctagatttactaggataagagaggataaaacgtggaaagaatctactcatctaaacgatttagtaaacttgactaaatcttaatagttacatacaaactgaaaattaaaataacactatttagttggtggtcgccatggatggtgttattgtatactgtctaaacgcgctagtaaaacatggcgaggaaataaatcatataaaaaatgatttcatgattaaaccatgttgtgaaagagtttgtgaaaaagtcaagaacgttcacattggcggacaatctaaaaacaatacagtgattgcagatttgccatatatggataatgcggtatccgatgtatgcaattcactgtataaaaagaatgtatcaagaatatccagatttgctaatttgataaagatagatgacgatgacaagactcctactggtgtatataattattttaaacctaaagatgccattcctgttatcatatctataggaaaggataaagatgtctgtgaactattaatctcatcagacatatcgtgtgcatgcgtggagttaaattcatatcacgtagccattcttcccatggatgtttccttttttaccaaaggaaatgcatcattgattattctcctgtttgatttctctatcgatgcggcacctctcttaagaagtgtaaccgataataatgttattatatctagacaccagcgtctacatgacgagcttccgagttccaattggttcaagttttacataagtataaagtccgactattgttctatattatatatggttgttgatggatctgtgatgcatgcgatagctgataatagaactcacgcaattattagcaaaaatatattagacaatactacgattaacgatgagtgtagatgctgttattttgaaccacagattaggattcttgatagagatgagatgctcaatggatcatcgtgtgatatgaacagacattgtattatgatgaatttacctgatgtaggcgaatttggatctagtatgttggggaaatatgaacctgacatgattaagattgctctttcggtggctggtaatttaataagaaatcgagactacattcccgggagacgaggatatagctactacgtttacggtatagcctctagataatttttttaagcacgaaataaaaaacataattttaaaccaatctatttcatactattttgtgtgatcaccatggacataaagatagatattagtatttctggtgataaatttacggtgactactaggagggaaaatgaagaaagaaaaaaatatctacctctccaaaaagaaaaaactactgatgttatcaaacctgattatcttgagtacgatgacttgttagatagagatgagatgtttactattctagaggaatattttatgtacagaggtctattaggcctcagaataaaatatggacgactctttaacgaaattaaaaaattcgacaatgatgcggaagaacaattcggtactatagaagaactcaagcagaaacttagattaaattctgaagagggagcagataactttatagattatataaaggtacaaaaacaggatatcgtcaaacttactgtatacgattgcatatctatgataggattgtgtgcatgcgtggtagatgtttggagaaatgagaaactgttttctagatggaaatattgtttacgagcgattaaactgtttattgatgatcacatgcttgataagataaaatctatactgcagaatagactagtatatgtggaaatgtcatagaaagttaaaagttaatgagagcaaaaatatataaggttgtattccatatttgttatttttttctgtaatagttagaaaaatacattcgatggtctatctatcagattattatgtgttataaggtactttttctcataataaactagagtatgagtaagatagtgtttttcaaaacatataaatctaaaattgatggatgagatatacagctattaatttcgaaaatatattttaatctgataactttaaacatggatttttaatggtggtttaacgttttaaaaaaagattttgttattgtagtatatgataatattaaaagatggatataaagaatttgctgactgcatgtactattttttacattactacattggctacggcagatatacctacttcgtcactgccacacgctccggtaaacggggcatgtgacgagggagaatatcttgataagaggcataatcaatgttgtaatcagtgtccacctggagaatttgccaaggttagatgtaatggtaacgataacacaaaatgtgaacgctgcccacctcatacatataccgcaatccccaattactctaatggatgtcatcaatgtagaaaatgcccaacaggatcatttgataaggtaaagtgtaccggaacacagaacagtaaatgttcgtgtcttcctggttggtattgcgctactgattcttcacagactgaagattgtcgagattgtataccaaaaaggagatgtccatgcggatactttggtggaatagatgaacaaggaaatcctatttgtaaatcgtgttgtgttggtgaatattgcgactacctacgtaattatagacttgatccatttcctccatgcaaactatctaaatgtaattaattatgattttgatgataatgttaccatacattatatcgctacttggttagtgtattattcagtatgaagacctattaataattacttatcttttgacgatcttgttataattataatataaaaatacttatggcatagtaactcataattgctgacgcgataaattcgtaataatctgttttgttcaaatttttataaggaatctacaggcataaaaataaaaatataatttataatatactcttacagcgcgccatcatgaataacagcagtgaattgattgctgttattaatggatttagaaatagtggacgattttgtgatattaatatagttattaatgatgaaaggataaacgctcacagactcatcctatctggagcctccgaatatttttccattctgttttccaataattttatcgattctaatgaatacgaagttaatctaagtcatttagattatcaaagtgttaacgatttgatcgattacatttatgggatacctttgagcctaactaacgataacgtgaaatatattctttcaaccgctgattttttacaaattggatctgctattacggagtgtgaaaattacatacttaaaaatctttgttctagaaactgtatcgatttctacatatacgctgataaatataataacaagaaaatagaatcagcgtcgtttaacacaatattacaaaatattttgagactcatcaacgatgaaaactttaaatacttaacagaggaatcaatgataaaaattttaagcgatgatatgttaaatataaaaaatgaggatttcgccccactaattctcattaaatggttagagagtactcaacaaccatgcaccgtcgagttacttaaatgcctcagaatatcattgctttccccacaagttataaaatcactttatagtcatcgactggttagttcaatctacgaatgtataacattcttaaacaatatagcattcttggatgaatcatttcctagataccatagcatcgagttgatatctatcggtataagtaattcgcatgataagatttccataaactgctacaatcataaaaaaaatacatgggaaatgatatcttcacgtagatataggtgtagtttcgcagtggccgtcctggataatattatctatatgatgggtggatatgatcagtccccgtatagaagttcaaaggttatagcgtacaatacatgtacaaattcttggatatatgatataccagagctaaaatatcctcgttctaattgtgggggactggctgatgacgaatacatttattgtataggcggcatacgcgatcaggattcatcgttgacatctagtattgatagatggaagccatcaaaaccatattggcagaagtatgctaaaatgcgcgaaccaaaatgtgatatgggggttgcgatgttaaacggattaatatatgttataggtggaatcgttaaaggtgacacgtgtaccgacgcactagagagtttatcagaagatggatggatgaagcatcaacgtcttccaataaaaatgtccaatatgtcgacgattgttcatgatggcaagatttatatatctggaggttacaacaatagtagtgtagttaatgtaatatcgaatctagtccttagctataattcgatatatgatgaatggaccaaattatcatcattaaacattcctagaattaatcccgctctatggtcagcgcataataaattatatgtaggaggaggaatatctgatgatgttcgaactaatacatctgagacatacgacaaagaaaaagattgttggacattggataatggtcacgtgttaccacgcaattatataatgtataaatgcgaaccgattaaacataaatatccattggaaaaaacacagtacacgaatgattttctaaagtatttggaaagttttataggtagttgatagaacaaaatacataattttgtaaaaataaatcactttttatactaatatgacacgattaccaatacttttgttactaatatcattagtatacgctacaccttttcctcagacatctaaaaaaataggtgatgatgcaactctatcatgtaatcgaaataatacaaatgactacgttgttatgagtgcttggtataaggagcccaattccattattcttttagctgctaaaagcgacgtcttgtattttgataattataccaaggataaaatatcttacgactctccatacgatgatctagttacaactatcacaattaaatcattgactgctagagatgccggtacttatgtatgtgcattctttatgacatcaactacaaatgacactgataaagtagattatgaagaatactccacagagttgattgtaaatacagatagtgaatcgactatagacataatactatctggatctacacattcaccggaaactagttctaagaaacctgattatatagataattctaattgctcgtcggtattcgaaatcggtacccggggatcagcttgcatgcctgcagcaattcccgaggctgtagccgacgatggtgcgccaggagagttgttgattcattgtttgcctccctgctgcggtttttcaccgaagttcatgccagtccagcgtttttgcagcagaaaagccgccgacttcggtttgcggtcgcgagtgaagatccctttcttgttaccgccaacgcgcaatatgccttgcgaggtcgcaaaatcggcgaaattccatacctgttcaccgacgacggcgctgacgcgatcaaagacgcggtgatacatatccagccatgcacactgatactcttcactccacatgtcggtgtacattgagtgcagcccggctaacgtatccacgccgtattcggtgatgataatcggctgatgcagtttctcctgccaggccagaagttctttttccagtaccttctctgccgtttccaaatcgccgctttggacataccatccgtaataacggttcaggcacagcacatcaaagagatcgctgatggtatcggtgtgagcgtcgcagaacattacattgacgcaggtgatcggacgcgtcgggtcgagtttacgcgttgcttccgccagtggcgcgaaatattcccgtgcaccttgcggacgggtatccggttcgttggcaatactccacatcaccacgcttgggtggtttttgtcacgcgctatcagctctttaatcgcctgtaagtgcgcttgctgagtttccccgttgactgcctcttcgctgtacagttctttcggcttgttgcccgcttcgaaaccaatgcctaaagagaggttaaagccgacagcagcagtttcatcaatcaccacgatgccatgttcatctgcccagtcgagcatctcttcagcgtaagggtaatgcgaggtacggtaggagttggccccaatccagtccattaatgcgtggtcgtgcaccatcagcacgttatcgaatcctttgccacgcaagtccgcatcttcatgacgaccaaagccagtaaagtagaacggtttgtggttaatcaggaactgttcgcccttcactgccactgaccggatgccgacgcgaagcgggtagatatcacactctgtctggcttttggctgtgacgcacagttcatagagataaccttcacccggttgccagaggtgcggattcaccacttgcaaagtcccgctagtgccttgtccagttgcaaccacctgttgatccgcatcacgcagttcaacgctgacatcaccattggccaccacctgccagtcaacagacgcgtggttacagtcttgcgcgacatgcgtcaccacggtgatatcgtccacccaggtgttcggcgtggtgtagagcattacgctgcgatggattccggcatagttaaagaaatcatggaagtaagactgctttttcttgccgttttcgtcggtaatcaccattcccggcgggatagtctgccagttcagttcgttgttcacacaaacggtgatacgtacacttttcccggcaataacatacggcgtgacatcggcttcaaatggcgtatagccgccctgatgctccatcacttcctgattattgacccacactttgccgtaatgagtgaccgcatcgaaacgcagcacgatacgctggcctgcccaacctttcggtataaagacttcgcgctgataccagacgttgcccgcataattacgaatatctgcatcggcgaactgatcgttaaaactgcctggcacagcaattgcccggctttcttgtaacgcgctttcccaccaacgctgatcaattccacagttttcgcgatccagactgaatgcccacaggccgtcgagttttttgatttcacgggttggggtttctacaggacgtaacattctagtcgaggaattcatttatagcatagaaaaaaacaaaatgaaattctactatatttttacatacatatattctaaatatgaaagtggtgattgtgactagcgtagcatcgcttctagacatctatatactatatagtaataccaatactcaagactacgaaactgatacaatctcttatcatgtgggtaatgttctcgatgtcgatagccatatgcccggtagttgcgatatacataaactgatcactaattccaaacccacccgctttttatagtaagtttttcacccataaataataaatacaataattaatttctcgtaaaagtagaaaatatattctaatttattgcacggtaaggaagtagaatcataaagaacagtgacggatccccgatccccgacctgcaggcatgcaagctcgactccggaaccaattactgataatgtagaagatcatacagacaccgtcacatacactagtgatagcattaatacagtaagtgcatcatctggagaatccacaacagacgagactccggaaccaattactgataaagaagatcatacagttacagacactgtctcatacactacagtaagtacatcatctggaattgtcactactaaatcaaccaccgatgatgcggatctttatgatacgtacaatgataatgatacagtaccaccaactactgtaggcggtagtacaacctctattagcaattataaaaccaaggactttgtagaaatatttggtattaccgcattaattatattgtcggccgtggcaattttctgtattacatattatatatataataaacgttcacgtaaatacaaaacagagaacaaagtctagatttttgacttacataaatgtctgggatagtaaaatctatcatattgagcggaccatctggtttaggaaagacagccatagccaaaagactatgggaatatatttggatttgtggtgtcccataccactagatttcctcgtcctatggaacgagaaggtgttgattaccattacgttaacagagaggccatctggaagggaatagccgccggaaactttctagaacatactgagtttttaggaaatatttacggaacttctaaaacagctgtgaatacagcggctattaataatcgtatttgtgtgatggatctaaacatcgacggtgttagaagtcttaaaaatacgtacctaatgccttactcggtgtatataagacctacctctcttaaaatggttgagaccaagcttcgtcgtagaaacactgaagctaacgatgagattcatcgtcgtgtgatgttggcaaaaactgacatggatgaggcaggtgaagccggtctattcgacactattatcattgaagatgatgtgaatttagcatatagtaagttaattcagatactacaggaccgtattagaatgtattttaacactaattagagacttaagacttaaaacttgataattaataatataactcgtttttatatgtgtctatttcaacgtctaatgtattagttaaatattaaaacttaccacgtaaaacttaaaatttaaaatgatatttcattgacagatagatcacacattatgaactttcaaggacttgtgttaactgacaattgcaaaaatcaatgggtcgttggaccattaataggaaaaggtggattcggtagtatttatactactaatgacaataattatgtagtaaaaatagagcccaaagctaacggatcattatttaccgaacaggcattttatactagagtacttaaaccatccgttatcgaagaatggaaaaaatctcacaatataaagcacgtaggtcttatcacgtgcaaggcatttggtctatacaaatccattaatgtggaatatcgattcttggtaattaatagattaggtgcagatctagatgcggtgatcagagccaataataatagactaccaaaaaggtcggtgatgttgatcggaatcgaaatcttaaataccatacaatttatgcacgagcaaggatattctcacggagatattaaagcgagtaatatagtcttagatcaaatagataagaataaattatatctagtggattacggattggtttctaaattcatgtctaatggcgaacatgttccatttataagaaatccaaataaaatggataacggtactctagaatttacacctatagattcgcataaaggatacgttgtatctagacgtggagatctagaaacacttggatattgtatgattagatggttgggaggtatcttaccatggactaagatatctgaaacaaagaattgtgcattagtaagtgccacaaaacagaaatatgttaacaatactgcgactttgttaatgaccagtttgcaatatgcacctagagaattgctgcaatatattaccatggtaaactctttgacatattttgaggaacccaattacgacaagtttcggcacatattaatgcagggtgtatattattaagtgtggtgtttggtcgataaaaattaaaaaataacttaatttattattgatctcgtgtgtacaaccgaaatcatggcgatgttttacgcacacgctctcggtgggtacgacgagaatcttcatgcctttcctggaatatcatcgactgttgccaatgatgtcaggaaatattctgttgtgtcagtttataataacaagtatgacattgtaaaagacaaatatatgtggtgttacagtcaggtgaacaagagatatattggagcactgctgcctatgtttgagtgcaatgaatatctacaaattggaaatccgatccatgatcaagaaggaaatcaaatctctatcatcacatatcgccacaaaaactactatgctctaagcggaatcgggtacgagagtctagacttgtgtttggaaggagtagggattcatcatcacgtacttgaaacaggaaacgctgtatatggaaaagttcaacatgattattctactatcaaagagaaggccaaagaaatgagtgcacttagtccaggacctatcatcgattaccacgtctggataggagattgtatctgtcaagttactgctgtggacgtacatggaaaggaaattatgaaaatgagattcaaaaagggtgcggtgcttccgatcccaaatctggtaaaagttaaacttggggagaatgatacagaaaatctttcttctactatatcggcggcaccatcgaggtaaccacctctctggaagacagcgtgaatcatgtactcatgaaacgtttggaaactatacgccatatgtggtctgttgtatatgatcattttgatattgtgaatggtaaagaatgctgttatgtgcatacgcattcatctaatcaaaatcctataccgagtactgtaaaaacaaatttgtacatgaagactatgggatcatgcattcaaatggattccatggaagctctagagtatcttagcgaactgaaggaatcaggtggatggagtcccagaccagaaatgcaggaatttgaatatccagatggagtggaagacactgaatcaattgagagattggcagaggagttcttcaatagatcagaacttcaggctggtgaatcagtcaaatttggtaattctattaattgttaaacatacatctgtttcagctaagcaactaagaacacgtatacggcagcagcttccttctatactctcatcttttaccaacacaaagggtggatatttgttcattggagttgataataatacacacaaagtatttggattcacggtgggttacgactacctcagactgatagagaatgatatagaaaagcatatcaaaagacttcgtgttgtgcatttctgtgagaagaaagaggacatcaagtacgcgtgtcgattcatcaaggtatataaacctggggatgagactacctcgacatacgtgtgcgctatcaaagtggaaagatgctgttgtgctgtgtttgcagattggccagaatcatggtatatggatactaatggtatcaagaagtattctccagatgaatgggtgtcacatataaaattttaattaatgtaactatagagaacaaataataaggttgtaatatcatatagacaataactaacaattaattagtaactgttatctcttttttaactaaccaactaactatatacctattaatacatcgtaattatagttcttaacatctattaatcattaattcgcttctttaattttttataaactaacattgttaattgaaaagggataacatgttacagaatataaattatatatggatttttttaaaaaggaaatacttgactggagtatatatttatctcttcattatatagcacgcgtgttttccaatttttccacatcccatataatacaggattataatctcgttcgaacatacgagaaagtggataaaacaatagttgattttttatctaggttgccaaatttattccatattttagaatatggggaaaatattctacatatttattctatggatgatgctaatacgaatattataattttttttctagatagagtattaaatattaataagaacgggtcatttatacacaatctcgggttatcatcatccattaatataaaagaatatgtatatcaattagttaataatgatcatccagataataggataagactaatgcttgaaaatggacgtagaacaagacattttttgtcctatatatcagatacagttaatatctatatatgtattttaataaatcatggattttatatagatgccgaagacagttacggttgtacattattacatagatgtatatatcactataagaaatcagaatcagaatcatacaatgaattaattaagatattgttaaataatggatcagatgtagataaaaaagatacgtacggaaacacaccttttatcctattatgtaaacacgatatcaacaacgtggaattgtttgagatatgtttagagaatgctaatatagactctgtagactttaatagatatacacctcttcattatgtctcatgtcgtaataaatatgattttgtaaagttattaatttctaaaggagcaaatgttaatgcgcgtaataaattcggaactactccattttattgtggaattatacacggtatctcgcttataaaactatatttggaatcagacacagagttagaaatagataatgaacatatagttcgtcatttaataatttttgatgctgttgaatctttagattatctattatccagaggagttattgatattaactatcgtactatatacaacgaaacatctatttacgacgctgtcagttataatgcgtataatacgttggtctatctattaaacaaaaatggtgattttgagacgattactactagtggatgtacatgtatttcggaagcagtcgcaaacaacaacaaaataataatggaagtactattgtctaaacgaccatctttgaaaattatgatacagtctatgatagcaattactaaacataaacagcataatgcagatttattgaaaatgtgtataaaatatactgcgtgtatgaccgattatgatactcttatagatgtacagtcgctacagcaatataaatggtatattttaagatgtttcgatgaaatagatatcatgaagagatgttatataaaaaataaaactgtattccaattagttttttgtatcaaagacattaatactttaatgagatacggtaaacatccttctttcgtgaaatgcactagtctcgacgtatacggaagtcgtgtacgtaatatcatagcatctattagatatcgtcagagattaattagtctattatccaagaagctggatcctggagataaatggtcgtgttttcctaacgaaataaaatataaaatattggaaaactttaacgataacgaactatccacatatctaaaaatcttataaacattattaaaatataaaatctaagtaggataaaatcacactacatcattgtttccttttagtgctcgacagtgtatactatttttaacgctcataaataaaaatgaaaacgatttccgttgttacgttgttatgcgtactacctgctgttgtttattcaacatgtactgtacccactatgaataacgctaaattaacgtctaccgaaacatcgtttaatgataaccagaaagttacgtttacatgtgatcagggatatcattctttggatccaaatgctgtctgtgaaacagataaatggaaatacgaaaatccatgcaaaaaaatgtgcacagtttctgattatgtctctgaactatataataaaccgctatacgaagtgaattccaccatgacactaagttgcaacggcgaaacaaaatattttcgttgcgaagaaaaaaatggaaatacttcttggaatgatactgttacgtgtcctaatgcggaatgtcaacctcttcaattagaacacggatcgtgtcaaccagttaaagaaaaatactcatttggggaatatatgactatcaactgtgatgttggatatgaggttattggtgcttcgtacataagttgtacagctaattcttggaatgttattccatcatgtcaacaaaaatgtgatatgccgtctctatctaacggattaatttccggatctacattttctatcggtggcgttatacatcttagttgtaaaagtggttttacactaacggggtctccatcatccacatgtatcgacggtaaatggaatcccatactcccaatatgtgtacgaactaacgaaaaatttgatccagtggatgatggtcccgacgatgagacagatttgagcaaactctcgaaagacgttgtacaatatgaacaagaaatagaatcgttagaagcaacttatcatataatcatagtggcgttgacaattatgggcgtcatatttttaatctccgttatagtattagtttgttcctgtgacaaaaataatgaccaatataagttccataaattgctaccgtaaatataaatccgttaaaataattaataatttaataacaaacaagtatcaaaagattaaagacttatagctagaatcaattgagatgtcttcttcagtggatgttgatatctacgatgccgttagagcatttttactcaggcactattataacaagagatttattgtgtatggaagaagtaacgccatattacataatatatacaggctatttacaagatgcgccgttataccgttcgatgatatagtacgtactatgccaaatgaatcacgtgttaaacaatgggtgatggatacacttaatggtataatgatgaatgaacgcgatgtttctgtaagcgttggcaccggaatactattcatggaaatgtttttcgattacaataaaaatagtatcaacaatcaactaatgtatgatataattaatagcgtatctataattctagctaatgagagatatagaagcgcttttaacgacgatggtatatacatccgtagaaatatgattaacaagttgtacggatacgcatctctaactactattggcacgatcgctggaggtgtttgttattatctgttgatgcatctagttagtttgtataaataattatttcaatatactagttaaaattttaagattttaaatgtataaaaaactaataacgtttttatttgtaataggtgcattagcatcctattcgaataatgagtacactccgtttaataaactgagtgtaaaactctatatagatggagtagataatatagaaaattcatatactgatgataataatgaattggtgttaaattttaaagagtacacaatttctattattacagagtcatgcgacgtcggatttgattccatagatatagatgttataaacgactataaaattattgatatgtataccattgactcgtctactattcaacgcagaggtcacacgtgtagaatatctaccaaattatcatgccattatgataagtacccttatattcacaaatatgatggtgatgagcgacaatattctattactgcagagggaaaatgctataaaggaataaaatatgaaataagtatgatcaacgatgatactctattgagaaaacatactcttaaaattggatctacttatatatttgatcgtcatggacatagtaatacatattattcaaaatatgatttttaaaaatttaaaatatattatcacttcagtgacagtagtcaaataacaaacaacaccatgagatatattataattctcgcagttttgttcattaatagtatacatgctaaaataactagttataagtttgaatccgtcaattttgattccaaaattgaatggactggggatggtctatacaatatatcccttaaaaattatggcatcaagacgtggcaaacaatgtatacaaatgtaccagaaggaacatacgacatatccgcatttccaaagaatgatttcgtatctttctgggttaaatttgaacaaggcgattataaagtggaagagtattgtacgggactatgcgtcgaagtaaaaattggaccaccgactgtaacattgactgaatacgacgaccatatcaatttgtacatcgagcatccgtatgctactagaggtagcaaaaagattcctatttacaaacgcggtgacatgtgtgatatctacttgttgtatacggctaacttcacattcggagattctaaagaaccagtaccatatgatatcgatgactacgattgcacgtctacaggttgcagcatagactttgtcacaacagaaaaagtgtgcgtgacagcacagggagccacagaagggtttctcgaaaaaattactccatggagttcgaaagtatgtctgacacctaaaaagagtgtatatacatgcgcaattagatccaaagaagatgttcccaatttcaaggacaaaatggccagagttatcaagagaaaatttaatacacagtctcaatcttatttaactaaatttctcggtagcacatcaaatgatgttaccacttttcttagcatgcttaacttgactaaatattcataactaatttttattaatgatacaaaaacgaaataaaactgcatattatacactggttaacgcccttataggctctaaccattttcaagatgaggtccctgattatagtccttctgttcccctctatcatctactccatgtctattagacgatgtgagaagactgaagaggaaacatggggattgaaaatagggttgtgtataattgccaaagatttctatcccgaaagaactgattgcagtgttcatctcccaactgcaagtgaaggattgataactgaaggcaatggattcagggatatacgaaacaccgataaattataaaaaaagcaatgtgtccgctgtttccgttaataatactattttcgtaactggcggattattcataaataactctaatagcacgatcgtggttaacaatatggaaaaacttgacatttataaagacaaacaatggtcgattatagaaatgcctatggctagggtatatcacggcattgactcgacatttggaatgttatattttgccggaggtctatccgttaccgaacaatatggtaatttagagaaaaacaacgagatatcttgttacaatcctagaacgaataagtggtttgatatttcatatactatttataagatatccatatcatcattgtgtaaactaaataacgtcttctatgtatttagtaaggacattggatatgtggaaaagtatgatggtgcatggaagttagtacatgatcgtctccccgctataaaggcattatcaacttctccttattgattgaaaatgaaaatataaatagtttttatgtatagcagtattaccctatagttttattgcttactactaacatggatacagatgttacaaatgtagaagatatcataaatgaaatagatagagagaaagaagaaatactaaaaaatgtagaaattgaaaataataaaaacattaacaagaatcatcccaatgaatatattagagaagcactcgttattaataccagtagtaatagtgattccattgataaagaagttatagaatgtatcagtcacgatgtaggaatatagatcatatctactaatttttataatcgatacaaaacataaaaaacaactcgttattacatagcaggcatggaatccttcaagtattgttttgataacgatggcaagaaatggattatcggaaatactttatattctggtaattcaatactctataaggtcagaaaaaatttcactagttcgttctacaattacgtaatgaagatagatcacaaatcacacaagccattgttgtctgaaatacgattctatatatctgtattggatcctttgactatcgacaactggacacgggaacgtggtataaagtatttggctattccagatctgtatggaattggagaaaccgatgattatatgttcttcgttataaagaattcgggaagagtattcgccccaaaggatactgaatcagtcttcgaagcatgcgtcactatgataaacacgttagagtttatacactctcgaggatttacccatggaaaaatagaaccgaggaatatactgattagaaataaacgtctttcactaattgactattctagaactaacaaactatacaagagtggaaactcacatatagattacaacgaggacatgataacttcaggaaatatcaattatatgtgtgtagacaatcatcttggagcaacagtttcaagacgaggagatttagaaatgttgggatattgcatgatagaatggttcggtggcaaacttccatggaaaaacgaaagtagtataaaagtaataaaacaaaaaaaagaatataaaaaatttatagctactttctttgaggactgttttcctgaaggaaatgaacctctggaattagttagatatatagaattagtatacacgttagattattctcaaactcctaattatgacagactacgtaaactgtttatacaagattgaaattatattcttttttttatagagtgtggtagtgttacggatatctaatattaatattagactatctctatcgcgctacacgaccaatatcgattactatggatatcttctatgaaaggagagaatgtatttatttctccagcgtcaatctcgtcagtattgacaatactgtattatggagctaatggatccactgctgaacagctatcaaaatatgtagaaacggaggagaacacggataaggttagcgctcagaatatctcattcaaatccatgaataaagtatatgggcgatattctgccgtgtttaaagattcctttttgagaaaaattggcgataagtttcaaactgttgacttcactgattgtcgcactatagatgcaatcaacaagtgtgtagatatctttactgaggggaaaatcaatccactattggatgaaccattgtctcctagcaattagtgccgtatactttaaagcaaaatggttgacgccattcgaaaaggaatttaccagtgattatcccttttacgtatctccgacggaaatggtagacgtaagtatgatgtctatgtacggcaaggcatttaatcacgcatctgtaaaagaatcattcggcaacttttcaatcatagaactgccatatgttggagatactagtatgatggtcattcttccagacaagattgatggattagaatccatagaacaaaatctaacagatacaaattttaagaaatggtgtgactttatggatgctatgtttatagatgttcacattcccaagtttaaggtaacaggctcgtataatctggtggatactctagtaaagtcaggactgacagaggtgttcggttcaactggagattatagcaatatgtgtaatttagatgtgagtgtcgacgctatgatccacaaaacgtatatagatgtcaatgaagagtatacagaagcagctgcagcaacttctgtactagtggcagactgtgcatcaacaattacaaatgagttctgtgcagatcatccgttcatctatgtgattaggcatgttgatggaaaaattcttttcgttggtagatattgctctccgacaactaattgttaaccattttttttaaaaaaaatagaaaaaacatgtggtattagtgcaggtcgttgttcttccaattgcaattggtaagatgacggccaactttagtacccacgtcttttcaccacagcactgtggatgtgacagactgaccagtattgatgacgtcaaacaatgtttgactgaatatatttattggtcgtcctatgcataccgcaacaggcaatgcgctggacaattgtattccacactcctctcttttagagatgatgcggaattagtgttcatcgacattcgcgagctggtaaaaaatatgccgtgggatgatgtcaaagattgtacagaaatcatccgttgttatataccggatgagcaaaaaaccatcagagagatttcggccatcatcggactttgtgcatatgctgctacttactggggaggtgaagaccatcccactagtaacagtctgaacgcattgtttgtgatgcttgagatgctaaattacgtggattataacatcatattccggcgtatgaattgatgagttgtacatcttgacattttctttcttctcttctccctttcttctcttctcccttcctccctcttctccctttcccagaaacaaacttttttacccactataaaataaaatgagtatactacctattatatttcttcctatatttttttattcttcattcgttcagacttttaacgcgtctgaatgtatcgacaaagggcaatattttgcatcattcatggagttagaaaacgagccagtaatcttaccatgtcctcaaataaatacgctatcatccggatataatatattagatattttatgggaaaaacgaggagcggataatgatagaattataccgatagataatggtagcaatatgctaattctgaacccgacacaatcagactctggtatttatatatgcattaccacgaacgaaacctactgtgacatgatgtcgttaaatttgacaatcgtgtctgtctcagaatcaaatatagatcttatctcgtatccacaaatagtaaatgagagatctactggcgaaatggtatgtcccaatattaatgcatttattgctagtaacgtaaacgcagatattatatggagcggacatcgacgccttagaaataagagacttaaacaacggacacctggaattattaccatagaagatgttagaaaaaatgatgctggttattatacatgtgttttagaatatatatacggtggcaaaacatataacgtaaccagaattgtaaaattagaggtacgggatagaataataccttctactatgcaattaccagatggcattgtaacttcaataggtagtaatttgactattgcatgcagagtatcgttgagacctcccacaacggacaccgacgtcttttggataagtaatggtatgtattacgaagaagatgatggggacggaaacggtagaataagtgtagcaaataaaatctatatgaccgataagagacgtgttattacatcccggttaaacattaatcctgtcaaggaagaagatgctacaacgtttacgtgtatggcgtttactattcctagcatcagcaaaacagttactgttagtataacgtgaatgtatgttgttacatttccatgtcaattgagtttataagaatttttatacattatcttccaacaaacaattgacgaacgtattgctatgattaactcccacgatactatgcatattattaatcattaacttgcagactatacctagtgctattttgacatactcgtgttcttgtgtaattgcggtatctatattattaaagtacgtaaatctagctatagttttattatttaattttagataatataccgtctccttatttttaaaaattgccacatcctttattaaatcatgaatgggaatttctatgtcatcgttagtatattgtgaacaacaagagcagatatctataggaaagggtggaatgcgatacattgatctatgtagttttaaaacacacgcgaactttgaagaatttatataaatcattccatcgatacatccttctatgttgacatgtatatatccaggaattcttttattaatgtcaggaaatgtataaactaaaacattgcccgaaagcggtgcctctatctgcgttatatccgttcttaacttacaaaatgtaaccaatacctttgcatgacttgttttgttcggcaacgttagtttaaacttgacgaatggattaattacaatagcatgatccgcgcatctattaagtttttttactttaacgcccttgtatgtttttacagagactttatctaaatttctagtgcttgtatgtgttataaatataacgggatatagaaccgaatcacctaccttagatacccaattacattttatcagatccagataataaacaaattttgtcgccctaactaattctatattgttatatattttacaattggttatgatatcatgtaataacttggagtctaacgcgcatcgtcgtacgtttatacaattgtgatttagtgtagtatatctacacatgtatttttccgcactatagtattctggactagtgataaaactatcgttatatctgtcttcaatgaactcatcgagatattgctctctgtcatattcatacacctgcataaactttctagacatcttacaatccgtgttattttaggatcatatttacatatttacgggtatatcaaagatgttagattagttaatgggaatcgtctataataatgaatattaaacaattatatgaggacttttaccacaaagcatcataaaaatgagtcgtcgtctgatttatgttttaaatatcaaccgcaaatcaactcataaaatacaagagaatgaaatatatacatattttagtcattgcaatatagaccatacttctacagaacttgattttgtagttaaaaactatgatctaaacagacgacaacctgtaactgggtatactgcactacactgctatttgtataataattactttacaaacgatgtactgaagatattattaaatcatgacgtaaatgtaacgatgaaaaccagtagcggacgtatgcctgtttatatattgcttactagatgttgtaatatttcacatgatgtagtgatagatatgatagacaaagataaaaaccacttattacatagagactattccaacctattactagagtatataaaatctcgttacatgttattgaaggaagaggatatcgatgagaacatagtatccactttattagataagggaatcgatcctaactttaaacaagacggatatacagcgttacattattattatttgtgtctcgcacacgtttataaactaggtgagtgtagaaaaccgataacgataaaaaaggccaagcgaattatttctttgtttatacaacatggagctaatctaaacgcgttagataattgtggtaatacaccattccatttgtatcttagtattgaaatgtgtaataatattcatatgactaaaatgctgttgacttttaatccgaatttcaaaatatgtaataatcatggattaacgcctatactatgttatataacttccgactacatacaacacgatattcttgttatgttaatacatcactatgaaacaaatgttggagaaatgccgatagatgagcgtcgtatgatcgtattcgagtttatcaaaacatattctacacgtccggcagattcgataacttatttgatgaataggtttaaaaatataaatatttatacccgctatgaaggaaagacattattacacgtagcatgtgaatataataatacacaagtaatagattatcttatacgtatcaacggagatataaatgcgttaaccgacaataacaaacacgctacacaactcattatagataacaaagaaaattccccatataccattaattgtttactgtatatacttagatatattgtagataagaatgtgataagatcgttggtggatcaacttccatctctacctatcttcgatataaaatcatttgagaaattcatatcctactgtatacttttagatgacacattttacgataggcacgttaagaatcgcgattctaaaacgtatcgatacgcattttcaaaatacatgtcgtttgataaatacgatggtataataactaaatgtcacgacgaaacaatgttactcaaactgtccactgttctagacactacactatatgcagttttaagatgtcataattcgagaaagttaagaagatacctcaacgagttaaaaaaatataataacgataagtcctttaaaatatattctaatattatgaatgagagataccttaatgtatattataaagatatgtacgtgtcaaaggtatatgataaactatttcctgttttcacagataaaaattgtctactaacattactaccttcagaaattatatacgaaatattatacatgctgacaattaacgatctttataatatatcgtatccacctaccaaagtatagttgtatttttctcatgcgatgtgtgtaaaaaaactgatattatataaatattttagtgccgtataataaagatgacgatgaaaatgatggtacatatatatttcgtatcattattgttattgctattccacagttacgccatagacatcgaaaatgaaatcacagaattcttcaataaaatgagagatactctaccagctaaagactctaaatggttgaatccagcatgtatgttcggaggcacaatgaatgatatagccgctctaggagagccattcagcgcaaagtgtcctcctattgaagacagtcttttatcgcacagatataaagactatgtggttaaatgggagaggctagaaaagaatagacggcgacaggtttctaataaacgtgttaaacatggtgatttatggatagccaactatacatctaaattcagtaaccgtaggtatttgtgcaccgtaactacaaagaatggtgactgtgttcagggtatagttagatctcatattaaaaaacctccttcatgcattccaaaaacatatgaactaggtactcatgataagtatggcatagacttatactgtggaattctttacgcaaaacattataataatataacttggtataaagataataaggaaattaatatcgacgacattaagtattcacaaacgggaaaggaattaattattcataatccagagttagaagatagcggaagatacgactgttacgttcattacgacgacgttagaatcaagaatgatatcgtagtatcaagatgtaaaatacttacggttataccgtcacaagaccacaggtttaaactaatactagatccgaaaatcaacgtaacgataggagaacctgccaatataacatgcactgctgtgtcaacgtcattattgatcgacgatgtactgattgaatgggaaaatccatccggatggcttataggattcgattttgatgtatactctgttttaactagtagaggcggtatcaccgaggcgaccttgtactttgaaaatgttactgaagaatatataggtaatacatataaatgtcgtggacacaactattattttgaaaaaacccttacaactacagtagtattggagtaaatatacaatgcatttttatatacattactgaattattattactgaattattattactgaattattattaattatatcgtatttgtgctatagaatggatgaagatacgcgactatctaggtatttgtatctcaccgatagagaacatataaatgtagactctattaaacagttgtgtaaaatatcagatcctaatgcatgttatagatgtggatgtacggctttacatgagtacttttataattatagatcagtcaacggaaaatacaagtatagatacaacggttactatcaatattattcatctagcgattatgaaaattataatgaatattattatgatagaactggtatgaacagtgagagtgataatatatcaatcaaaacagaatatgaattctatgatgaaacacaagatcaaagtacacaactagtaggttacgacattaaactcaaaaccaatgaggatgattttatggctatgatagatcagtgggtgtccatgattatatagatgaatcaattaataaagtagtatatggaagagagtctcacgtaagatggcgggatatatggcaagaacataatgatggcgtatacagtataggaaaggagtgcatagataatatatacgaagacaaccataccgtagacgaattctacaagatagacagcgtatcagatgtagatgacgcggaacacatatctccgataactaaaaaaccatagaatcagttgatgataatacctacatttctaatcttccgtataccatcaaatacaaaatattcgagcaacaataagtattttttatacctttaaaactgataaataaattttttctagtgatattttggcaagatgagaatcctatttctcatcgctttcatgtatgggtgtgttcactcatatgttaacgcggttgaaaccaaatgtccaaatctagacattgtaacatcttctggagaatttcattgttcaggatgtgtggaacatatgcctgagtttagctatatgtattggttggcaaaggatatgaaatcggacgaggataccaagtttatagaacatctgggtgatggcatcaaagaagatgaaaccgttcgtaccacagatagtggaatcgtcactctacgtaaagtccttcatgtgactgatactaataaatttgataattataggttcacttgtgtcctcgctacgctagatggcatttataaaaagaatgtttgctgaagtagttgtgtgctactatttttatttatgatataatctaatggaattaatttgaattgatatttatccaatactaaagattatattagaatcaaattaatcttttatacgagaaaaaataacgacatacgtcgtcaacaaattaaactttttatttattagttaactagcttatagaacttgctcattgttatgtttctaaaacgggtacggcatataggacaattatccgacgcaccggtttctcttcgtgttctatgccatatattgatgcatgttatgcaaaatatatgagtacacgaatccaataaaccaaagtatctatcgttttgagtaaacaacttcatagcaaattccacattctttttctttacttactctatacacgtcctcgtatttatttagtattttgatgatatccaactcagaaatggttgttgtattattgggtgtatttggagtataggtattattagctatgtaccaatttaccaaccctcttaatattgattgataatcacatcggttatccaattaataactaaattgtagtgtatatatagaccatatatgtttctatttttttgacagttacgtatagtttcagtaagttttgattgttgtattcctgtatctctagataagttagtcatatagtcccttccggcgatacgttttttccaagcccgaaattgattagccaaatgtgtatttatttttgtgatattgatataatatttcggataatgcatactgttagtcttatatcatttggttcatctatgtattgtaatattgttacatgatctatagatgatgtattgattttggcaggatcgaattccatatccgcgactaaacagtgaaaaaaatgtaaatactttttaaattttaaattagtaaaacttttttttattttttatgattccaaaaatactgaatacaaagtcctaaattataaatatggagatcatactaccacaacttattattatgtatacaaggccggtgtaatagatagatatatataattctattacaccggcagacaattaccgaccggtatttgtcgttaccaacataccgtataatatgtaatatacaattccataacccattgacagttgttatacatcaaaattgcaattcttttgattacgatgttataagaatgtagttaattgatgtatgatgttaatgtgtcctctttcctcttataacatcgtaatcaaaaacttttttataatatatacctaataatgtgtcttaatagttctcgtgattcgtcaaacaatcattcttataaaatataataaagcaacgtaaaaacacataaaaataagcgtaactaataagacaatggatatttacgacgataaaggtctacagactattaaactgtttaataatgaatttgattgtataaggaatgacatcagagaattatttaaacatgtaactgattccgatagtatacaacttccgatggaagacaattctgatattatagaaaatatcagaaaaatactatatagacgattaaaaaatgtagaatgtgttgacatcgataacacaataacttttatgaaatacgatccaaatgatgataataagcgtacgtgttctaattgggtacccttaactaataactatatggaatattgtctagtaatatatttggaaacaccgatatgtggaggcaaaataaaattataccaccctacaggaaatataaagtcggataaggatattatgtttgcaaagactctagactttaaatcaacgaaagtgttaactggacgtaaaacaattgccgttctagacatatccgtttcatataatagatcaatgactactattcactacaacgacgacgttgatatagatatacatactgataaaaatggaaaagagttatgttattgttatataacaatagatgatcattacttggttgatgtggaaactataggagttatagtcaatagatctggaaaatgtctgttagtaaataaccatctaggtataggtatcgttaaagataaacgtataagcgatagttttggagatgtatgtatggatacaatatttgacttttctgaagcacgagagttattttcattaactaatgatgataacaggaatatagcatgggacactgataaactagacgatgatacagatatatggactcccgtcacagaagatgattacaaatttctttctagactagtattgtatgcaaaatctcaatcggatactgtatttgactattatgttcttactggtgatacggaaccacccactgtattcattttcaaggtaactagattttactttaatatgccgaaataaaaaatttttgtataatatctagaggtagaggtattgtttagataaatacaaataacatagatacatcgcatacttagcatttttataaatatacataagacatacactttatacatttttgtaaaaatactcataaaaaaatttataaaaattatggcacaaccatatcttgtataggtagtttagttcgtcgagtgaacctataaacagataatagacaacacataataatgcctactaatacaagcataataccgggagatgggatatatgacgttgtagtgtttgggttttctgaacgttgatagtctactaatactacatgctgacatctaatgcctgtataaccatgagagcatctacaatacataccgtcaatatctctagcgtggatacagtcaccgtgtaaacaatatccatctccctctggaccgcataatctgatagctggaatatctgttgtagcgtttgtaatttctggcaatgtcgtttcgatagcgttaccactatcggcgaatgatctgattatcatagcagcgaacaacaacatcagataatttatcaacatttttgatggattctgtgtttatgctgtttctcagtgtgtgtttatgacaagattgggaattttatattattaattcagtaatataaactaataatatattgttaattgtgtaaataatataaaaataacaatacaatattgaatgtgttgctgttaaaaatgtatgtgttaatataatagaataaaataaatgagtatgatcattttagataacgattgattttatcattaccgcttcattcttatattctttgcttacggaacctatatttagaaacatctactaacaattttttatgcttgcattattaatggtatgtaatatgattgattgtgtacgcaataccaatttgttaagtatgaatacggggtacaaacataaattgaaatttaacattatttatttatgatatatatcgttatcgttaggtctataccatggatatctttaaagaactaatcttaaaacaccctgatgaaaatgttttgatttctccagtttccattttatctactttatctattctaaatcatggagcagctggttctacagctgaacaactatcaaaatatatagagaatatgaatgagaatacacccgatgacaataatgatgacatggaggtagatattccgtattgtgcgacactagctaccgcaaataaaatatacggtagcgatagtatcgagttccacgcctccttcctacaaaaaataaaagacgattttcaaactgtaaactttaataatgctaaccaaacaaaggaactaatcaacgaatgggttaagacaatgacaaatggtaaaattaattccttattgactagtccgctatccattaatactcgtatgacagttgttagcgccgtccattttaaagcaatgtggaaatatccattttctaaacatcttacatatacagacaagttttatatttctaagaatatagttaccagcgttgatatgatggtgggtaccgagaataacttgcaatatgtacatattaatgaattattcggaggattctctattatcgatattccatacgagggaaactctagtatggtaattatactaccggacgacatagaaggtatatataacatagaaaaaaatataacagatgaaaaatttaaaaaatggtgtggtatgttatctactaaaagtatagacttgtatatgccaaagtttaaagtggaaatgacagaaccgtataatctggtaccgattttagaaaatttaggacttactaatatattcggatattatgcagattttagcaagatgtgtaatgaaactatcactgtagaaaaatttctacatacgacgtttatagatgttaatgaggagtatacagaagcatcggccgttacaggagtatttacgattaacttttcgatggtatatcgtacgaaggtctacataaaccatccattcatgtacatgattaaagacaccacaggacgtatactttttatagggaaatactgctatccgcaataaatataaacaaatagacttttataaagagtcttcaacgataagtatatcgacatactacttatgctgcgaaagattctgaacgagaacgactatctcaccctcttggatcatatccgcactgctaaatactaaatctccactacactttttatcatcttatgaggaatgattgccttcgtgaaataggaataattagcaccagaatagctatggattattgtggtagagagtgcactattctatgtcgtctactggatgaagatgtgacgtacaaaaaaataaaactagaaattgaaacgtgtcacaacttatcaaaacatatagatagacgaggaaacaatgcgctacattgttacgtctccaataaatgcgatacagacattaagattgttctctcgcggagtcgagagactttgtagaaacaacgaaggattaactccgctaggagtatacagtaagcatagatacgtaaaatctcagattgtgcatctactgatatccagctattcaaattcctctaacgaactcaagtcgaatataaatgatttcgatctgtattcggataatatcgacttacgtctgctaaaatacctaattgtggataaacggatacgtccgtccaagaatacgaattatgcaatcaatggtctcggattggtggatatatacgtaacgacgcctaatccgagaccagaagtattgctatggcttcttaaatcagaatgttacagcaccggttacgtatttcgtacctgtatgtacgacagtgatatgtgtaagaactctcttcattactatatatcgtctcatagagaatctcaatctctatccaaggatgtaattaaatgtttgatcgataacaatgtttccatccatggcagagacgaaggaggatctttacccatccaatactactggtctttctcaaccatagatatagagattgttaaattattattaataaaggatgtggacacgtgtagagtatacgacgtcagccctatattagaggcgtattatctaaacaagcgatttagagtaaccccatataatgtagacatggaaatcgttaatcttcttattgagagacgtcatactcttgtcgacgtaatgcgtagtattacttcgtacgattccagagaatataaccactacatcatcgataacattctaaagagatttagacaacaggatgaatccatcgtacaagccatactgataaactacttacattacggcgatatggtcgttcgatgcatgttagataacggacaacaactatcctctacacgactactttgttaataataatctcgtcgatgtaaacgtcgtaaggtttatcgtggaaaatatggacacgcggctgtaaatcacgtatcgaacaatggccgtctatgtatgtacggtctgatattatcgagatttaataattgcgggtatcactgttatgaaaccatactgatagatgtatttgatatactaagcaagtacatggatgatatagatatgatcgataactctactatattacgcggtcgatgtcaataatatacaatttgcaaagcggttattggaatatggagcgagtatcacgctcgataatcaatacggccatccagaaaagcagttacagaagagaaaacaaaacgaaatcgttgttctacaagatgtctctccctacgacgattactacgtaaaaaagatactagcctactgcctattaagggacgagtcattcgcggaactacatagtaaattctgtttaaacgaggactataaaagtgtatttatgaaaaatatatcattcgataagatagattccatcatcgtgacataagtcgcctcaaagagattcgaatctccgacaccgacctgtatacggtatcacagctatcttaaagccatacattcagacagtcacatttcatttcccatgtacgacgatctcatagaacagtgccatctatcgatggagcgtaaaagtaaactcgtcgacaaagcactcaataaattagagtctaccatcggtcaatctagactatcgtatttgcctccggaaattatgcgcaatatcatctaaacagtatgttgtacggaaagaaccattacaaatattatccatgatagaaagaaaatatctatatgattggagaagtaggaaacaggaacaagacaacgattactacattattaaatcatgaagtccgtattatactcgtatatattgtttctctcatgtataataataaacggaagagatatagcaccgcatgcaccatccgatggaaagtgtaaagacaacgaatacaaacgccataatttgtgtccgggaacatacgcttccagattatgcgatagcaagactaacacacgatgtacgccgtgtggttcgggtaccttcacatctcgcaataatcatttacccgcttgtctaagttgtaacggaagacgcgatcgtgtaacacgactcacaatagaatctgtgaatgctctcccggatattattgtcttctcaaaggatcatccggatgcaaggcatgtgtttcccaaacaaaatgtggaataggatacggagtatccggagacgtcatctgttctccgtgtggtctcggaacatattctcacaccgtctcttccgcagataaatgcgaacccgtacccagaaatacgtttaactatatcgatgtggaaattaacctgtatccagttaacgacacgtcgtgtactcggacgaccactaccggtctcagcgaatccatctcaacgtcggaactaactattactatgaatcataaagactgtaatcccgtatttcgtgatggatacttctccgttcttaataaggtagcgacttcaggtttctttacaggagaaaggtgtgcactctgaatttcgagattaaatgcaataacaaagattcttcctccaaacagttaacgaaagcaaagaatgatactatcatgccgcattcggagacagtaactctagtgggcgacatctatatactatatagtaataccaatactcaagactacgaaactgatacaatctcttatcatgtgggtaatgttctcgatgtcgatagccatatgcccggtagttgcgatatacataaactgatcactaattccaaacccacccactttttatagtaagtttttcacccataaataataaatacaataattaatttctcgtaaaagtagaaaatatattctaatttattgcacggtaaggaagtagaatcataaagaacagtactcaatcaatagcaattatgaaacaatatatcgtcctggcatgcatgtgcctggcggcagctgctatgcctgccagtcttcagcaatcatcctcatcctcctcctcgtgtacggaagaagaaaacaaacatcatatgggaatcgatgttattatcaaagtcacaaagcaagaccaaacaccgaccaatgataagatttgccaatccgtaacggaaattacagagtccgagtcagatccagatcccgaggtggaatcagaagatgattccacatcagtcgaggatgtagatcctcctaccacttattactccatcatcggtggaggtctgagaatgaactttggattcaccaaatgtcctcagattaaatccatctcagaatccgctgatggaaacacagtgaatgctagattgtccagcgtgtccccaggacaaggtaaggactctcccgcgatcactcatgaagaagctcttgctatgatcaaagactgtgaagtgtctatcgacatcagatgtagcgaagaagagaaagacagcgacatcaagacccatccagtactcgggtctaacatctctcataagaaagtgagttacgaagatatcatcggttcaacgatcgtcgatacaaaatgcgtcaagaatctagagtttagcgttcgtatcggagacatgtgcaaggaatcatctgaacttgaggtcaaggatggattcaagtatgtcgacggatcggcatctgaaggtgcaaccgatgatacttcactcatcgattcaacaaaactcaaagcgtgtgtctgaatcgataactctattcatctgaaattggatgagtagggttaatcgaacgattcaggcacaccacgaattaaaaaagtgtaccggacactatattccggtttgcaaaacaaaaatgttcttaactacattcacaaaaagttacctctcgcgacttcttctttttctgtctcaatagtgtgatacgattatgacactattcctattcctattcctatttcctttcagagtatcacaaaaatattaaacctctttctgatggtctcataaaaaaagttttacaaaaatatttttattctctttctctctttgatggtctcataaaaaaagttttacaaaaatatttttattctctttctctctttgatggtctcataaaaaaagttttacaaaaatatttttattctctttctctctttgatggtctcataaaaaaagttttacaaaaatatttttattctctttctctctttgatggtctcataaaaaaagttttacaaaaatatttttattctctttctctctttgatggtctcataaaaaaagttttacaaaaatatttttattctctttctctctttgatggtctcataaaaaaagttttacaaaaatatttttattctctttctctctttgatggtctcataaaaaaagttttacaaaaatatttttattctctttctctctttgatggtctcataaaaaaagttttacaaaaatatttttattctctttctctctttgatggtctcataaaaaaagttttacaaaaatatttttattctctttctctctttgatggtctcataaaaaaagttttacaaaaatatttttattctctttctctctttgatggtctcataaaaaaagttttacaaaaatatttttattctctttctctctttgatggtctcataaaaaagttttacaaaaatatttttattctctttctctctttgatggtctcataaaaaagttttacaaaaatatttttattctctttctctctttgatggtctcataaaaaaagttttacaaaaatatttttattctctttctctctttgatggtctcataa

SEQ ID NO: 2 - DNA, 190167 bp, Vaccinia virus
  LIVP genome (reconstituted from GLV-1h68 sequence)
ttatgagaccatcaaagagagaaagagaataaaaatatttttgtaaaactttttttatgagaccatcaaagagagaaagagaataaaaatatttttgtaaaacttttttatgagaccatcaaagagagaaagagaataaaaatatttttgtaaaacttttttatgagaccatcaaagagagaaagagaataaaaatatttttgtaaaactttttttatgagaccatcaaagagagaaagagaataaaaatatttttgtaaaactttttttatgagaccatcaaagagagaaagagaataaaaatatttttgtaaaactttttttatgagaccatcaaagagagaaagagaataaaaatatttttgtaaaactttttttatgagaccatcaaagagagaaagagaataaaaatatttttgtaaaactttttttatgagaccatcaaagagagaaagagaataaaaatatttttgtaaaactttttttatgagaccatcaaagagagaaagagaataaaaatatttttgtaaaactttttttatgagaccatcaaagagagaaagagaataaaaatatttttgtaaaactttttttatgagaccatcaaagagagaaagagaataaaaatatttttgtaaaactttttttatgagaccatcaaagagagaaagagaataaaaatatttttgtaaaactttttttatgagaccatcaaagagagaaagagaataaaaatatttttgtaaaactttttttatgagaccatcaaagagagaaagagaataaaaatatttttgtaaaactttttttatgagaccatcagaaagaggtttaatatttttgtgatactctgaaaggaaataggaataggaataggaatagtgtcataatcgtatcacactattgagacagaaaaagaagaagtcgcgagaggtaactttttgtgaatgtagttaagaacatttttgttttgcaaaccggaatatagtgtccggtacacttttttaattcgtggtgtgcctgaatcgttcgattaaccctactcatccaatttcagatgaatagagttatcgattcagacacacgctttgagttttgttgaatcgatgagtgaagtatcatcggttgcaccttcagatgccgatccgtcgacatacttgaatccatccttgacctcaagttcagatgattccttgcacatgtctccgatacgaacgctaaactctagattcttgacgcattttgtatcgacgatcgttgaaccgatgatatcttcgtaactcactttcttatgagagatgttagacccgagtactggatgggtcttgatgtcgctgtctttctcttcttcgctacatctgatgtcgatagacacttcacagtctttgatcatagcaagagcttcttcatgagtgatcgcgggagagtccttaccttgtcctggggacacgctggacaatctagcattcactgtgtttccatcagcggattctgagatggatttaatctgaggacatttggtgaatccaaagttcattctcagacctccaccgatgatggagtaataagtggtaggaggatctacatcctcgactgatgtggaatcatcttctgattccacctcgggatctggatctgactcggactctgtaatttccgttacggattggcaaatcttatcattggtcggtgtttggtcttgctttgtgactttgataataacatcgattcccatatgatgtttgttttcttcttccgtacacgaggaggaggatgaggatgattgctgaagactggcaggcatagcagctgccgccaggcacatgcatgccaggacgatatattgtttcataattgctattgattgagtactgttctttatgattctacttccttaccgtgcaataaattagaatatattttctacttttacgagaaattaattattgtatttattatttatgggtgaaaaacttactataaaaagtgggtgggtttggaattagtgatcagtttatgtatatcgcaactaccgggcatatggctatcgacatcgagaacattacccacatgataagagattgtatcagtttcgtagtcttgagtattggtattactatatagtatatagatgtcgcccactagagttactgtctccgaatgcggcatgatagtatcattctttgctttcgttaactgtttggaggaagaatctttgttattgcatttaatctcgaaattcagagtgcacacctttctcctgtaaagaaacctgaagtcgctaccttattaagaacggagaagtatccatcacgaaatacgggattacagtctttatgattcatagtaatagttagttccgacgttgagatggattcgctgagaccggtagtggtcgtccgagtacacgacgtgtcgttaactggatacaggttaatttccacatcgatatagttaaacgtatttctgggtacgggttcgcatttatctgcggaagagacggtgtgagaatatgttccgagaccacacggagaacagatgacgtctccggatactccgtatcctattccacattttgtttgggaaacacatgccttgcatccggatgatcctttgagaagacaataatatccgggagagcattcacagattctattgtgagtcgtgttacacgatcgcgtcttccgttacaacttagacaagcgggtaaatgattattgcgagatgtgaaggtacccgaaccacacggcgtacatcgtgtgttagtcttgctatcgcataatctggaagcgtatgttcccggacacaaattatggcgtttgtattcgttgtctttacactttccatcggatggtgcatgcggtgctatatctcttccgtttattattatacatgagagaaacaatatatacgagtataatacggacttcatgatttaataatgtagtaatcgttgtcttgttcctgtttcctacttctccaatcatatagatattttctttctatcatggataatatttgtaatggttctttccgtacaacatactgtttagatgatattgcgcataatttccggaggcaaatacgatagtctagattgaccgatggtagactctaatttattgagtgctttgtcgacgagtttacttttacgctccatcgatagatggcactgttctatgagatcgtcgtacatgggaaatgaaatgtgactgtctgaatgtatggctttaagatagctgtgataccgtatacaggtcggtgtcggagattcgaatctctttgaggcgacttatgtcacgatgatggaatctatcttatcgaatgatatatttttcataaatacacttttatagtcctcgtttaaacagaatttactatgtagttccgcgaatgactcgtcccttaataggcagtaggctagtatcttttttacgtagtaatcgtcgtagggagagacatcttgtagaacaacgatttcgttttgttttctcttctgtaactgcttttctggatggccgtattgattatcgagcgtgatactcgctccatattccaataaccgctttgcaaattgtatattattgacatcgaccgcgtaatatagtagagttatcgatcatatctatatcatccatgtacttgcttagtatatcaaatacatctatcagtatggtttcataacagtgatacccgcaattattaaatctcgataatatcagaccgtacatacatagacggccattgttcgatacgtgatttacagccgcgtgtccatattttccacgataaaccttacgacgtttacatcgacgagattattattaacaaagtagtcgtgtagaggatagttgttgtccgttatctaacatgcatcgaacgaccatatcgccgtaatgtaagtagtttatcagtatggcttgtacgatggattcatcctgttgtctaaatctctttagaatgttatcgatgatgtagtggttatattctctggaatcgtacgaagtaatactacgcattacgtcgacaagagtatgacgtctctcaataagaagattaacgatttccatgtctacattatatggggttactctaaatcgcttgtttagataatacgcctctaatatagggctgacgtcgtatactctacacgtgtccacatcctttattaataataatttaacaatctctatatctatggttgagaaagaccagtagtattggatgggtaaagatcctccttcgtctctgccatggatggaaacattgttatcgatcaaacatttaattacatccttggatagagattgagattctctatgagacgatatatagtaatgaagagagttcttacacatatcactgtcgtacatacaggtacgaaatacgtaaccggtgctgtaacattctgatttaagaagccatagcaatacttctggtctcggattaggcgtcgttacgtatatatccaccaatccgagaccattgattgcataattcgtattcttggacggacgtatccgtttatccacaattaggtattttagcagacgtaagtcgatattatccgaatacagatcgaaatcatttatattcgacttgagttcgttagaggaatttgaatagctggatatcagtagatgcacaatctgagattttacgtatctatgcttactgtatactcctagcggagttaatccttcgttgtttctacaaagtctctcgactccgcgagagaacaatcttaatgtctgtatcgcatttattggagacgtaacaatgtagcgcattgtttcctcgtctatctatatgttttgataagttgtgacacgtttcaatttctagttttatttttttgtacgtcacatcttcatccagtagacgacatagaatagtgcactctctaccacaataatccatagctattctggtgctaattattcctatttcacgaaggcaatcattcctcataagatgataaaaagtgtagtggagatttagtatttagcagtgcggatatgatccaagagggtgagatagtcgttctcgttcagaatctttcgcagcataagtagtatgtcgatatacttatcgttgaagactctttataaaagtctatttgtttatatttattgcggatagcagtatttccctataaaaagtatacgtcctgtggtgtctttaatcatgtacatgaatggatggtttatgtagaccttcgtacgatataccatcgaaaagttaatcgtaaatactcctgtaacggccgatgcttctgtatactcctcattaacatctataaacgtcgtatgtagaaatttttctacagtgatagtttcattacacatcttgctaaaatctgcataatatccgaatatattagtaagtcctaaattttctaaaatcggtaccagattatacggttctgtcatttccactttaaactttggcatatacaagtctatacttttagtagataacataccacaccattttttaaatttttcatctgttatatttttttctatgttatatataccttctatgtcgtccggtagtataattaccatactagagtttccctcgtatggaatatcgataatagagaatcctccgaataattcattaatatgtacatattgcaagttattctcggtacccaccatcatatcaacgctggtaactatattcttagaaatataaaacttgtctgtatatgtaagatgtttagaaaatggatatttccacattgctttaaaatggacggcgctaacaactgtcatacgagtattaatggatagcggactagtcaataaggaattaattttaccatttgtcattgtcttaacccattcgttgattagttcctttgtttggttagcattattaaagtttacagtttgaaaatcgtcttttattttttgtaggaaggaggcgtggaactcgatactatcgctaccgtatattttatttgcggtagctagtgtcgcacaatacggaatatctacctccatgtcatcattattgtcatcgggtgtattctcattcatattctctatatattttgatagttgttcagctgtagaaccagctgctccatgatttagaatagataaagtagataaaatggaaactggagaaatcaaaacattttcatcagggtgttttaagattagttctttaaagatatccatggtatagacctaacgataacgatatatatcataaataaataatgttaaatttcaatttatgtttgtaccccgtattcatacttaacaaattggtattgcgtacacaatcaatcatattacataccattaataatgcaagcataaaaaattgttagtagatgtttctaaatataggttccgtaagcaaagaatataagaatgaagcggtaatgataaaatcaatcgttatctaaaatgatcatactcatttattttattctattatattaacacatacatttttaacagcaacacattcaatattgtattgttatttttatattatttacacaattaacaatatattattagtttatattactgaattaataatataaaattcccaatcttgtcataaacacacactgagaaacagcataaacacagaatccatcaaaaatgttgataaattatctgatgttgttgttcgctgctatgataatcagatcattcgccgatagtggtaacgctatcgaaacgacattgccagaaattacaaacgctacaacagatattccagctatcagattatgcggtccagagggagatggatattgtttacacggtgactgtatccacgctagagatattgacggtatgtattgtagatgctctcatggttatacaggcattagatgtcagcatgtagtattagtagactatcaacgttcagaaaacccaaacactacaacgtcatatatcccatctcccggtattatgcttgtattagtaggcattattatgtgttgtctattatctgtttataggttcactcgacgaactaaactacctatacaagatatggttgtgccataatttttataaatttttttatgagtatttttacaaaaatgtataaagtgtatgtcttatgtatatttataaaaatgctaagtatgcgatgtatctatgttatttgtatttatctaaacaatacctctacctctagatattatacaaaaattttttatttcggcatattaaagtaaaatctagttaccttgaaaatgaatacagtgggtggttccgtatcaccagtaagaacataatagtcaaatacagtatccgattgagattttgcatacaatactagtctagaaagaaatttgtaatcatcttctgtgacgggagtccatatatctgtatcatcgtctagtttatcagtgtcccatgctatattcctgttatcatcattagttaatgaaaataactctcgtgcttcagaaaagtcaaatattgtatccatacatacatctccaaaactatcgcttatacgtttatctttaacgatacctatacctagatggttatttactaacagacattttccagatctattgactataactcctatagtttccacatcaaccaagtaatgatcatctattgttatataacaataacataactcttttccatttttatcagtatgtatatctatatcaacgtcgtcgttgtagtgaatagtagtcattgatctattatatgaaacggatatgtctagaacggcaattgttttacgtccagttaacactttcgttgatttaaagtctagagtctttgcaaacataatatccttatccgactttatatttcctgtagggtggtataattttattttgcctccacatatcggtgtttccaaatatattactagacaatattccatatagttattagttaagggtacccaattagaacacgtacgcttattatcatcatttggatcgtatttcataaaagttattgtgttatcgatgtcaacacattctacattttttaatcgtctatatagtatttttctgatattttctataatatcagaattgtcttccatcggaagttgtatactatcggaatcagttacatgtttaaataattctctgatgtcattccttatacaatcaaattcattattaaacagtttaatagtctgtagacctttatcgtcgtaaatatccattgtcttattagttacgcttatttttatgtgtttttacgttgctttattatattttataagaatgattgtttgacgaatcacgagaactattaagacacattattaggtatatattataaaaaagtttttgattacgatgttataagaggaaagaggacacattaacatcatacatcaattaactacattcttataacatcgtaatcaaaagaattgcaattttgatgtataacaactgtcaatgggttatggaattgtatattacatattatacggtatgttggtaacgacaaataccggtcggtaattgtctgccggtgtaatagaattatatatatctatctattacaccggccttgtatacataataataagttgtggtagtatgatctccatatttataatttaggactttgtattcagtatttttggaatcataaaaaataaaaaaaagttttactaatttaaaatttaaaaagtatttacatttttttcactgtttagtcgcggatatggaattcgatcctgccaaaatcaatacatcatctatagatcatgtaacaatattacaatacatagatgaaccaaatgatataagactaacagtatgcattatccgaaatattatatcaatatcacaaaaataaatacacatttggctaatcaatttcgggcttggaaaaaacgtatcgccggaagggactatatgactaacttatctagagatacaggaatacaacaatcaaaacttactgaaactatacgtaactgtcaaaaaaatagaaacatatatggtctatatatacactacaatttagttattaattggataaccgatgtgattatcaatcaatattaagagggttggtaaattggtacatagctaataatacctatactccaaatacacccaataatacaacaaccatttctgagttggatatcatcaaaatactaaataaatacgaggacgtgtatagagtaagtaaagaaaaagaatgtggaatttgctatgaagttgtttactcaaaacgatagatactttggtttattggattcgtgtactcatatattttgcataacatgcatcaatatatggcatagaacacgaagagaaaccggtgcgtcggataattgtcctatatgccgtacccgttttagaaacataacaatgagcaagttctataagctagttaactaataaataaaaagtttaatttgttgacgacgtatgtcgttattttttctcgtataaaagattaatttgattctaatataatctttagtattggataaatatcaattcaaattaattccattagattatatcataaataaaaatagtagcacacaactacttcagcaaacattctttttataaatgccatctagcgtagcgaggacacaagtgaacctataattatcaaatttattagtatcagtcacatgaaggactttacgtagagtgacgattccactatctgtggtacgaacggtttcatcttctttgatgccatcacccagatgttctataaacttggtatcctcgtccgatttcatatcctttgccaaccaatacatatagctaaactcaggcatatgttccacacatcctgaacaatgaaattctccagaagatgttacaatgtctagatttggacatttggtttcaaccgcgttaacatatgagtgaacacacccatacatgaaagcgatgagaaataggattctcatcttgccaaaatatcactagaaaaaatttatttatcagttttaaaggtataaaaaatacttattgttgctcgaatattttgtatttgatggtatacggaagattagaaatgtaggtattatcatcaactgattctatggttttatgtattctatcatgtttcactattgcgttggaaataatatcatatgcttccacatatattttattttgttttaactcataatactcacgtaattctggattattggcatatctatgaataattttagctccatgatcagtaaatattaatgagaacatagtattaccacctaccattatttttttcatctcattcaattcttaattgcaaagatctatataatcattatagcgttgacttatggactctggaatcttagacgatgtacagtcatctataatcatggcatatttaatacattgttttatagcatagtcgttatctacgatgttagatatttctctcaatgaatcaatcacacaatctaatgtaggtttatgacataatagcattttcagcagttcaatgtttttagattcgttgatggcaatggctatacatgtatatccgttatttgatctaatgttgacatctgaaccggattctagcagtaaagatactagagattgtttattatatctaacagccttgtgaagaagtgtttctcctcgtttgtcaatcatgttaatgtctttaagataaggtaggcaaatgtttatagtactaagaattgggcaagcataagacatgtcacaaagacccttttttgtatgtataagtgtaaaaattataacatccatagttggatttacataggtgtccaatcgggatctctccatcatcgagataattgatggcatctcccttccttttttagtagatatttcatcgtgtaagaatcaatattaatatttctaaagtatccgtgtatagcctctttatttaccacagctccatattccactagagggatatcgccgaatgtcatatactcaattagtatatgttggaggacatccgagttcattgttttcaatatcaaagagatggtttccttatcatttctccatagtggtacaatactacacattattccgtgcggctttccattttccaaaaacaatttgaccaaatctaaatctacatctttattgtatctataatcactatttagataatcagccataattcctcgagtgcaacatgttagatcgtctatatatgaataagcagtgttatctattcctttcattaacaatttaacgatgtctatatctatatgagatgacttaatataatattgaagagctgtacaatagtttttatctataaaagacggcttgattccgtgattaattagacatttaacaacttccggacgcacatatgctctcgtatccgactctgaatacagatgagagatgatatacagatgcaatacggtaccgcaatttcgtagttgataatcatcatacgcgtatcagtactcgtcctcataaagaacactgcagccattttctatgaacaaatcaataattttagaaacaggatcattgtcattacataattttctataactgaacgatggttttcacatttaacactcaagtcaaatccatgttctaccaacacctttatcaagtcaacgtctacatttttggatttcatatagctgaatatattaaagttatttatgttgctaaatccagtggcttctagtagagccatcgctatatccttattaactttaacatgtctactatttgtgtattcttctaatggggtaagctgtctccaatttttgcgtaatggattagtgccactgtctagtagtagtttgacgacctcgacattattacaatgctcattaaaaaggtatgcgtgtaaagcattattcttgaattggttcctggtatcattaggatctctgtctttcaacatctgtttaagttcatcaagagccacctcctcattttccaaatagtcaaacattttgactgaatgagctactgtgaactctatacacccacacaactaatgtcattaaatatcatgtcaaaaacttgtacaattattaataaaaataatttagtgtttaaattttaccagttccagattttacacctccgttaatacctccattaaccccactggacgatcctcctccccacattccaccgccaccagatgtataagttttagatcctttattactaccatcatgtccatggataaagacactccacatgccgccactaccccctttagaagacatattaataagacttaaggacaagtttaacaataaaattaatcacgagtaccctactaccaacctacactattatatgattatagtttctatttttacagtaccttgactaaagtttctagtcacaagagcaatactaccaacctacactattatatgattatagtttctatttttataggaacgcgtacgagaaaatcaaatgtctaatttctaacggtagtgttgataaacgattgttatccgcggatacctcctctatcatgtcgtctattttcttactttgttctattaacttattagcattatatattatttgattataaaacttatattgcttattagcccaatctgtaaatatcggattattaacatatcgtttctttgtaggtttatttaacatgtacatcactgtaagcatgtccttaccatttattttaatttgacgcatatccgcaatttctttttcgcagtcggttataaattctatatatgatggatacatgctacatgtgtacttataatcgactaatatgaagtacttgatacatattttcagtaacgatttattattaccacctatgaataagtacctgtgatcgtctaggtaatcaactgttttcttaatacattcgatggttggtaatttactcagaataatttccaatatcttaatatataattctgctatttctgggatatatttatctgccagtataacacaaatagtaatacatgtaaacccatattttgttattatattaatgtctgcgccattatctattaaccattctactaggctgacactatgcgactcaatacaatgataaagtatactacatccatgtttatctattttgtttatatcatcaatatacggcttacaaagttttagtatcgataacacatccaactcacgcatagagaaggtagggaataatggcataatatttattaggttatcatcattgtcattatctacaactaagtttccattttttaaaatatactcgacaactttaggatctctattgccaaatttttgaaaatatttatttatatgcttaaatctatataatgtagctccttcatcaatcatacatttaataacattgatgtatactgtatgataagatacatattctaacaatagatcttgtatagaatctgtatatcttttaagaattgtggatattaggatattattacataaactattacacaattctaaaatataaaacgtatcacggtcgaataatagttgatcaactatataattatcgattttgtgatttttcttcctaaactgtttacgtaaatagttagatagaatattcattagttcatgaccactatagttactatcgaataacgcgtcaaatatttcccgtttaatatcgcatttgtcaagataataatagagtgtggtatgttcacgataagtataataacgcatctctttttcgtgtgaaattaaatagtttattacgtccaaagatgtagcataaccatcttgtgacctagtaataatataataatagagaactgttttacccattctatcatcataatcagtggtgtagtcgtaatcgtaatcgtctaattcatcatcccaattataatattcaccagcacgtctaatctgttctattttgatcttgtatccatactgtatgttgctacatgtaggtattcctttatccaataatagtttaaacacatctacattgggatttgatgttgtagcgtatttttctacaatattaataccatttttgatactatttatttctatacctttcgaaattagtaatttcaataagtctatattgatgttatcagaacatagatattcgaatatatcaaaatcattgatatttttatagtcgactgacgacaataacaaaatcacaacatcgtttttgatattattatttttcttggtaacgtatgcctttaatggagtttcaccatcatactcatataatggatttgcaccactttctatcaatgattgtgcactgctggcatcgatgttaaatgttttacaactatcatagagtatcttatcgttaaccatgattggttgttgatgctatcgcattttttggtttctttcatttcagttatgtatggatttagcacgtttgggaagcatgagctcatatgatttcagtactgtagtgtcagtactattagtttcaataagatcaatctctagatctatagaatcaaaacacgataggtcagaagataatgaatatctgtaggcttcttgttgtactgtaacttctggttttgttagatggttgcatcgtgctttaacgtcaatggtacaaattttatcctcgctttgtgtatcatattcgtccctactataaaattgtatattcagattatcatgcgatgtgtatacgctaacggtatcaataaacggagcacaccatttagtcataaccgtaatccaaaaatttttaaagtatatcttaacgaaagaagttgtgtcattgtctacggtgtatggtactagatcctcataagtgtatatatctagagtaatgtttaatttattaaatggttgataatatggatcctcgtgacaatttccgaagatggaaataagacataaacacgcaataaatctaattgcggacatggttactccttaaaaaaatacgaataatcaccttggctatttagtaagtgtcatttaacactatactcatattaatccatggactcataatctctatacgggattaacggatgttctatatacggggatgagtagttctcttctttaactttatactttttactaatcatatttagactgatgtatgggtaatagtgtttgaagagctcgttctcatcatcagaataaatcaatatctctgtttttttgttatacagatgtattacagcctcatatattacgtaatagaacgtgtcatctaccttattaactttcaccgcatagttgtttgcaaatacggttaatcctttgacctcgtcgatttccgaccaatctgggcgtataatgaatctaaactttaattgcttgtaatcattcgaaataatttttagtttgcatccgtagttatcccctttatgtaactgtaaatttctcaacgcgatatctccattaataatgatgtcgaattcgtgctgtatacccatactgaatggatgaacgaataccgacggcgttaatagtaatttactttttcatctttacatattgggtactagttttactatcataagtttataaattccacaagctactatggaataagccaaccatcttagtataccacacatgtcttaaagtttattaattaattacatgttgttttatatatatcgctacgaatttaaagagaaattagtttaggaagaaaaattatctatctacatcatcacgtctctgtattctacgatagagtgctactttaagatgcgacagatccgtgtcatcaaatatatactccattaaaatgattattccggcagcgaacttgatattggatatatcacaacctttgttaatatctacgacaatagacagcagtcccatggttccataaacagtgagtttatctttctttgaagagatattttgtagagatcttataaaactgtcgaatgacatcgcatttatatctttagctaaatcgtatatgttaccatcgtaatatctaaccgcgtctatcttaaacgtttccatcgctttaaagacgtttccgatagatggtctcatttcatcagtcatactgagccaacaaatataatcgtgtataacatctttgatagaatcagactctaaagaaaacgaatcggctttattatacgcattcatgataaacttaatgaaaaatgtttttcgttgtttaagttggatgaatagtatgtcttaataattgttattatttcattaattaatatttagtaacgagtacactctataaaaacgagaatgacataactaatcataactagttatcaaagtgtctaggacgcgtaattttcatatggtatagatcctgtaagcattgtctgtattctggagctattttctctatcgcattagtgagttcagaatatgttataaatttaaatcgaataacgaacataactttagtaaagtcgtctatattaactcttttattttctagccatcgtaataccatgtttaagatagtatattctctagttactacgatctcatcgttgtctagaatatcacatactgaatctacatccaattttagaaattggtctgtgttacatatctcttctatattattgttgatgtattgtcgtagaaaactattacgtagaccattttctttataaaacgaatatatagtactccaattatctttaccgatatatttgcacacataatccattctctcaatcactacatctttaagattttcgttgttaagatatttggctaaactatataattctattagatcatcaacagaatcagtatatatttttctagatccaaagacgaactctttggcgtcctctataatattcccagaaaagatattttcgtgttttagtttatcgagatctgatctgttcatatacgccatgattgtacggtacgttatgataaccgcataaaataaaaatccattttcatttttaaccaatactattcataattgagattgatgtaatactttgttactttgaacgtaaagacagtacacggatccgtatctccaacaagcacgtagtaatcaaatttggtgttgttaaacttcgcaatattcatcaatttagatagaaacttatactcatcatctgttttaggaatccatgtattattaccactttccaacttatcattatcccaggctatgtttcgtccatcatcgttgcgcagagtgaataattcttttgtattcggtagttcaaatatatgatccatgcatagatcggcaaagctattgtagatgtgatttttcctaaatctaatataaaactcgtttactagcaaacactttcctgatttatcgaccaagacacatatggtttctaaatctatcaagtggtggggatccatagttatgacgcagtaacatatattattacattcttgactgtcgctaatatctaaatatttattgttatcgtattggattctgcatatagatggcttgtatgtcaaagatatagaacacataaccaatttatagtcgcgctttacattctcgaatctaaagttaagagatttagaaaacattatatcctcggatgatgttatcactgtttctggagtaggatatattaaagtctttacagatttcgtccgattcaaataaatcactaaataatatcccacattatcatctgttagagtagtatcattaaatctattatattttatgaaagatatatcactgctcacctctatatttcgtacatttttaaactgtttgtataatatctctctgatacaatcagatatatctattgtgtcggtagacgataccgttacatttgaattaatggtgttccattttacaacttttaacaagttgaccaattcatttctaatagtatcaaactctccatgattaaatattttaatagtatccattttatatcactacggacacaaagtagctgacataaaccattgtataatttttatgttttatgtttattagcgtacacattttggaagttccggcttccatgtatttcctggagagcaagtagatgatgaggaaccagatagtttatatccgtacttgcacttaaagtctacattgtcgttgtatgagtatgatcttttaaacccgctagacaagtatccgtttgatattgtaggatgtggacatttaacaatctgacacgtgggtggatcggaccattctcctcctgaacacaggacactagagttaccaatcaacgaatatccactattgcaactataagttacaacgctcccatcggtataaaaatcctcgtatccgttatgtcttccgttggatatagatggaggggattggcatttaacagattcacaaataggtgcctcgggattccataccatagatccagtagatcctaattcacaatacgatttagattcaccgatcaactgatatccgctattacaagagtacgttatactagagccaaagtctactccaccaatatcaagttggccattatcgatatctcgaggcgatgggcatctccgtttaatacattgattaaagagtgtccatccagtacctgtacatttagcatatataggtcccattttttgctttctgtatccaggtagacatagatattctatagtgtctcctatgttgtaattagcattagcatcagtctccacactattcttaaatttcatattaatgggtcgtgacggaatagtacagcatgatagaacgcatcctattcccaacaatgtcaggaacgtcacgctctccaccttcatatttatttatccgtaaaaatgttatcctggacatcgtacaaataataaaaagcccatatatgttcgctattgtagaaattgtttttcacagttgctcaaaaacgatggcagtgacttatgagttacgttacactttggagtctcatctttagtaaacatatcataatattcgatattacgagttgacatatcgaacaaattccaagtatttgattttggataatattcgtattttgcatctgctataattaagatataatcaccgcaagaacacacgaacatctttcctacatggttaaagtacatgtacaattctatccatttgtcttccttaactatatatttgtatagataattacgagtctcgtgagtaattccagtaattacatagatgtcgccgtcgtactctacagcataaactatactatgatgtctaggcatgggagacttttttatccaacgatttttagtgaaacattccacatcgtttaatactacatatttctcatacgtggtataaactccacccattacatatatatcatcgtttacgaataccgacgcgcctgaatatctaggagtaattaagtttggaagtcttatccatttcgaagtgccgtgtttcaaatattctgccacacccgttgaaatagaaaattctaatcctcctattacatataactttccatcgttaacacaagtactaacttctgattttaacgacgacatattagtaaccgttttccattttttcgttttaagatctacccgcgatacggaataaacatgtctattgttaatcatgccgccaataatgtatagacaattatgtaaaacatttgcattatagaattgtctatctgtattaccgactatcgtccaatattctgttctaggagagtaatgggttattgtggatatataatcagagtttttaatgactactatattatgttttataccatttcgtgtcactggctttgtagatttggatatagttaatcccaacaatgatatagcattgcgcatagtattagtcataaacttgggatgtaaaatgttgatgatatctacatcgtttggatttttatgtatccactttaataatatcatagctgtaacatcctcatgatttacgttaacgtcttcgtgggataagatagttgtcagttcatcctttgataattttccaaattctggatcggatgtcaccgcagtaatattgttgattatttctgacatcgacgcattatatagttttttaattccatatcttttagaaaagttaaacatccttatacaatttgtgaaattaatattatgaatcatagtttttacacatagatctactacaggcggaacatcaattattatggcagcaactagtatcatttctacattgtttatggtgatgtttatcttcttccagcgcatatagtctaatagcgattcaaacgcgtgatagtttataccattcaatataatcgcttcatcctttagatggtgatcctgaatgcgtttaaaaaaattatacggagacgccgtaataatttccttattcacttgtataatttccccattgatagaaaatattacgctttccattcttaaagtactataagtaattatagtataatgtaaacgtttatatattcaatatttttataaaaatcattttgacattaattcctttttaaatttccgtctatcatctatagaaacgtattctatgaatttataaaatgcttttacgtgtcctatcgtaggcgatagaaccgctaaaaagcctatcgaatttctacaaaagaatctgttatatggtatagggagagtataaaacattaaatgtccgtacttattaaagtattcagtagccaatcctaactctttcgaatacttattaatggctcttgttctgtacgaatctatttttttgaacaacggacctagtggtatatcttgttctatgtatctaaaataatgtctgactagatccgttagtttaatatccgcagtcatcttgtctagaatggcaaatctaactgcgggtttaggctttagtttagtttctatatctacatctatgtctttatctaacaccaaaaatataatagctaatattttattacaatcatccggatattcttctacgatctcactaactaatgtttctttggttatactagtatagtcactatcggacaaataaagaaaatcagatgatcgatgaataatacatttaaattcatcatctgtaagatttttgagatgtctcattagaatattattagggttagtactcattatcattcggcagctattacttattttattatttttcaccatatagatcaatcattagatcatcaaaatatgtttcaatcatcctaaagagtatggtgaatgactcttcccatctaatttctgaacgttcaccaatgtctctagccactttggcactaatagcgatcattcgcttagcgtcttctatattattaactggttgatttaatctatctagcaatggaccgtcggacagcgtcattctcatgttcttaatcaatgtacatacatcgccgtcatctaccaattcatccaacaacataagctttttaaaatcatcattataataggtttgatcgttgtcatttctccaaagaatatatctaataagtagagtcctcatgcttagttaacaactattttttatgttaaatcaattagtacaccgctatgtttaatacttattcatattttagtttttaggattgagaatcaatacaaaaattaatgcatcattaattttagaaatacttagtttccacgtagtcaatgaaacatttgaactcatcgtacaggacgttctcgtacaggacgtaactataaaccggtttatatttgttcaagatagatacaaatccgataactttttttacgaattctacgggatccactttaaaagtgtcataccgggttctttttatttttttaaacagatcaatggtgtgatgttgattaggtcttttacgaatttgatatagaatagcgtttacatattctccataatggtcaatcgccatttgttcgtatgtcataaattctttaattatatgacactgtgtattatttagttcatccttgttcattgttaggaatctatccaaaatggcaattatactagaactataggtgcgttgtatacacatattgatgtgtctgtttatacaatccatgatatttggatccatgctactaccttcgggtaaaattgtagcatcatataccatttctagtactttaggttcattattatccattgcagaggacgtcatgatcgaatcataaaaaaatatattatttttatgttattttgttaaaaataatcatcgaatacttcgtaagatactccttcatgaacataatcagttacaaaacgtttatatgaagtaaagtatctacgatttttacaaaagtccggatgcataagtacaaagtacgcgataaacggaataataatagatttatctagtctatctttttctatagctttcatagttagatacatggtctcagaagtaggattatgtaacatcagcttcgataaaatgactgggttatttagtcttacacattcgctcatacatgtatgaccgttaactacagagtctacactaaaatgattgaacaatagatagtctaccattgtttcgtattcagatagtacagcgtagtacatggcatcttcacaaattatatcattgtctaatagatatttgacgcatcttatggatcccacttcaacagccatcttaaaatcatattgctttcctttatcattaataatttctagaacatcatctctatcataaaagatacaaatattaactgtttgatccgtaataacattgctagtcaatagcaatttgttaataagatgcgctgggctcaatgtcttaataagaagtgtaagaggactatctccgaatttgttttgtttattaacatccgttgatggaagtaaaagatctataatgtctacattcttgactgttttagagcatacaatatggagaggtgtatttccatcatgatctggttttgagggactaattcctagtttcatcatccatgagattgtagaagcttttggattgtctgacataagatgtctatgaatatgatttttgccaaatttatccactatcctggcttcgaatccgatggacattatttttttaaacactctttctgaaggatctgtacacgccaacaacggaccacatccttcttcatcaaccgagttgttaatcttggctccatactgtaccaataaatttattctctctatgacttcatcatctgttcccgagagataatatagaggtgttttatgctgtttatcacacgcgtttggatctgcgccgtgcgtcagcagcatcgcgactattctattattattaattttagaagctatatgcaatggataatttccatcatcatccgtctcatttggagagtatcctctatgaagaagttcttcgacaaatcgttcatctagtcctttaattccacaatacgcatgtagaatgtgataattatttccagaaggttcgatagcttgtagcatattcctaaatacatctaaatttttactattatatttggcataaagagatagataatactcggccgacataatgttgtccattgtagtataaaaattaatatttctatttctatttctgtatatttgcaacaatttactctctataacaaatatcataacttagtttttttatgtcaagaaggcactggtttagttcatctataaatgtcacgccataactaccacgcatgccatactcagaattatgataaagatatttatccttggggtgtaggtaatggggattaatctttgttggatcagtctctaagttaacacatgtcacacatgatccatttatagttatatcacacgatgatgatttatgaattgattccggaagatcgctatcgtattttgtggttccacaattcatttccatacatgttattgtcacactaatattatgatgaactttatctagccgctgagtggtaaacaacagaacagatagtttattatctttaccaacaccctcagccgctgccacaaatctctgatccgtatccatgatggtcatgtttatttctagtccgtatccagtcaacactatgttagcatttctgtcgatatagctttcactcatatgacactcaccaataatagtagaattaatgtcgtaatttacaccaatagtgagttcggcggcaaagtaccaataccggtaatcttgtcgaggaggacatatagtattcttgtattctaccgaatacccgagagatgcgatacaaaagagcaagactaatttgtaaaccatcttactcaaaatatgtaacaatagtacgatgcaatgagtaagacaataggaaatctatcttatatacacataattattctatcaattttaccaattagttagtgtaatgttaacaaaaatgtgggagaatctaattagtttttctttacacaattgacgtacatgagtctgagttccttgtttttgctaattatttcatccaatttattattcttgacgatatcgagatcttttgtataggagtcaaacttgtattcaacatgcttttctataatcattttagctatttcggcatcatccaatagtacattttccagattagcagaatagatattaatgtcgtatttgaacagagcctgtaacatctcaatgtctttattatctatagccaatttaatgtccggaatgaagagaagggaattattggtgtttgtcgacgtcatatagtcgagcaagagaatcatcatatccacgtgtccattttttatagtgatgtgaatacaactaaggagaatagccagatcaaaagtagatggtatctctgaaagaaagtaggaaacaatacttacatcattaagcatgacggcatgataaaatgaagttttccatccagttttcccatagaacatcagtctccaatttttcttaacaaacagttttaccgtttgcatgttaccactatcaaccgcataatacaatgcggtgtttcccttgtcatcaaattgtgaatcatccagtccactgaatagcaaaatctttactattttggtatcttccaatgtggctgcctgatgtaatggaaattcattctctagaagatttttcaatgctccagcgttcaacaacgtacatactagacgcacgttattatcagctattgcataatacaaggcactatgtccatggacatccgccttaaatgtatctttactagagagaaagcttttcagctgcttagacttccaagtattaattcgtgacagatccatgtctgaaacgagacgctaattagtgtatattttttcattttttataattttgtcatattgcaccagaattaataatatctttaatagatctgattagtagatacatggctatcgcaaaacaacatatacacatttaataaaaataatatttattaagaaaattcagatttcacgtacccatcaatataaataaaataatgattccttacaccgtacccatattaaggagattccaccttacccataaacaatataaatccagtaatatcatgtctgatgatgaacacaaatggtgtattaaattccagtttttcaggagatgatctcgccgtagctaccataatagtagatgcctctgctacagttccttgttcgtcgacatctatctttgcattctgaaacattttataaatatataatgggtccctagtcatatgtttaaacgacgcattatctggattaaacatactaggagccatcatttcggctatcgacttaatatccctcttattttcgatagaaaatttagggagtttaagattgtacactttattccctaattgagacgaccaatagtctaattttgcagccgtgatagaatctgtgaaatgggtcatattatcacctattgccaggtacatactaatattagcatccttatacggaaggcgtaccatgtcatattctttgtcatcgattgtgattgtatttccttgcaatttagtaactacgttcatcatgggaaccgttttcgtaccgtacttattagtaaaactagcattgcgtgttttagtgatatcaaacggatattgccatatacctttaaaatatatagtattaatgattgcccatagagtattattgtcgagcatattagaatctactacattagacataccggatctacgttctactatagaattaattttattaaccgcatctcgtctaaagtttaatctatataggccgaatctatgatattgttgataatacgacggtttaatgcacacagtattatctacgaaactttgataagttagatcagtgtacgtatatttagatgttttcagcttagctaatcctgatattaattctgtaaatgctggacccagatctctttttctcaaatccatagtcttcaataattctattctagtattacctgatgcaggcaatagcgacataaacatagaaaacgaataaccaaacggtgagaagacaatattatcatcttgaatatttttatacgctactataccggcattggtaaatccttgtagacgataggcggacgctgaacacgctaacgatagtatcaataacgcaatcatgattttatggtattaataattaaccttatttttatgttcggtataaaaaaattattgatgtctacacatccttttgtaattgacatctatatatccttttgtataatcaactctaatcactttaacttttacagttttccctaccagtttatccctatattcaacatatctatccatatgcatcttaacactctctgccaagatagcttcagagtgaggatagtcaaaaagataaatatatagagcataatcattctcgtatactctgccctttattacatcacccgcattgggcaacgaataacaaaatgcaagcatcttgttaacgggctcgtaaattgggataaaaattatgtttttattgtcttatatctattttattcaagagaatattcaggaatttctttttccggttgtatctcgtcgcagtatatatcatttgtacattgtttcatattttttaatagtttacaccttttagtaggactagtatcgtacaattcatagctgtattttgaattccaatcacgcataaaaatatcttccaattgttgacgaagacctaatccatcatccggtgtaatattaatagatgctccacatgtatccgtaaagtaatttcctgtccaatttgaggtacctatataggccgttttatcggttaccatatatttggcatggtttaccctagaatacggaatgggaggatcagcatctggtacaataaatagctttacttctatatttatgtttttagattttagcatagcgatagatcttaaaaagtttctcatgataaacgaagatcgttgccagcaactaatcaatagcttaacggatacttgtctgtctatagcggatcttcttaattcatcttctatataaggccaaaacaaaattttacccgccttcgaataaataatagggataaagttcataacagatacataaacgaatttactcgcatttctaatacatgacaataaagcggttaaatcattggttctttccatagtacatagttgttgcggtgcagaagcaataaatacagagtgtggaacgccgcttacgttaatactaagaggatgatctgtattataatacgacggataaaagtttttccaattatatggtagattgttaactccaagataccagtatacctcaaaaatttgagtgagatccgctgccaagttcctattattgaagatcgcaatacccaattccttgacctgagttagtgatctccaatccatgttagcgcttcctaaataaatatgtgtattatcagatatccaaaattttgtatgaagaactcctcctaggatatttgtaatatctatgtatcgtacttcaactccggccatttgtagtctttcaacatcctttaatggtttgttagatttattaacggctactctaactcgtactcctcttttgggtaattgtacaatctcgtttaatattatcgtgccgaaattcgtacccacttcatccgataaactccaataaaaagatgatatatctagtgtttttgtggtattggatagaatttccctccacatgttaaatgtagacaaatatactttatcaaattgcatacctataggaatagtttctgtaatcactgcgattgtattatccggattcattttatttgttaaaagaataatcctatatcacttcactctattaaaaatccaagtttctatttctttcatgactgattttttaacttcatccgtttccttatgaagatgatgtttggcaccttcataaatttttatttctctattacaatttgcatgttgcatgaaataatatgcacctaaaacatcgctaatcttattgtttgttccctggagtatgagagtcggggggtgttaatcttggaaattatttttctaaccttgttggtagccttcaagacctgactagcaaatccagccttaattttttcatgattgactaatgggtcgtattggtatttataaactttatccatatctctagatactgattctggacatagctttccgactggcgcatttggtgtgatggttcccataagtttggcagctagcagattcagtcttgaaacagcatctgcattaactagaggagacattagaatcattgctgtaaacaagtttggattatcgtaagaggctagctcccatggaatgacccaataagtagatttaatagttaccacgtgctgtaccaaagtcatcaatcatcattttttcaccattacttcttccatgtccaatatgatcatgtgagaatactaaaattcctaacgatgatatgttttcagctagttcgtcataacgtccagaatgtttaccagctccatgacttatgaatactaatgccttaggatatgtaataggtttccaatatttacaatatatgtaatcattgtccagattgaacatacagtttgcactcatgattcacgttatataactatcaatattaacagttcgtttgatgatcatattatttttatgttttattgataattgtaaaaacatacaattaaatcaatatagaggaaggagacggctactgtcttttgtaagatagtcatggcgactaaattagattatgaggatgctgttttttactttgtggatgatgataaaatatgtagtcgcgactccatcatcgatctaatagatgaatatattacgtggagaaatcatgttatagtgtttaacaaagatattaccagttgtggaagactgtacaaggaattgatgaagttcgatgatgtcgctatacggtactatggtattgataaaattaatgagattgtcgaagctatgagcgaaggagaccactacatcaattttacaaaagtccatgatcaggaaagtttattcgctaccataggaatatgtgctaaaatcactgaacattggggatacaaaaagatttcagaatctagattccaatcattgggaaacattacagatttgatgaccgacgataatataaacatcttgatactttttctagaaaaaaaattgaattgatgatataggggtcttcataacgcataattattacgttagcattctatatccgtgttaaaaaaaattatcctatcatgtatttgagagttttatatgtagcaaacatgatagctgtgatgccaataagctttagatattcacgcgtgctagtgttagggatggtattatctggtggtgaaatgtccgttatataatctacaaaacaatcatcgcatatagtatgcgatagtagagtaaacatttttatagtttttactggattcatacatcgtctacccaattcggttataaatgaaattgtcgccaatcttacacccaaccccttgttatccattagcatagtattaacttcgttatttatgtcataaactgtaaatgattttgtagatgccatatcatacatgatattcatgtccctattataatcattactaactttatcacaatatatgttgataatatctatatatgatctagtctttgtgggcaactgtctatacaagtcgtctaaacgttgtttactcatatagtatcgaacagccatcattacatggtcccgttccgttgatagataatcgagtatgttagtggacttgtcaaatctatataccatattttctggaagtggatatacatagtcgtgatcaacattattgctagcctcatcttctatatcctgtactataccattatctatatcatctacataatctatgatattattacacataaacatcgacaacatactattgtttattatctaagtcctgttgatccaaacccttgatctcctctatttgtactatctagagattgtacttcttccagttctggataatatatacgttgatagattagctgagctattctatctccagtatttacattaaacgtacattttccattattaataagaatgactcctatgtttcccctataatcttcgtctattacaccacctcctatatcaatgccttttagtgacagaccagacctaggagctattctaccatagcagaacttaggcatggacatactaatatctgtcttaattaactgtctttctcctggagggatagtataatcgtaagcgctatacaaatcatatccggcagcacccggcgattgcctagtaggagatttagctctgttagtttccttaacaaatctaactggtgagttaatattcatgttgaacataaaactaatattttatttcaaaattatttaccatcccatatattccatgaataagtgtgatgattgtacacttctatagtatctatatacgatccacgataaaatcctcctatcaatagcagtttattatccactatgatcaattctggattatccctcggataaataggatcatctatcagagtccatgtattgctggattcacaataaaattccgcatttctaccaaccaagaataaccttctaccgaacactaacgcgcatgatttataatgaggataataagtggatggtccaaactgccactgatcatgattgggtagcaaatattctgtagttgtatcagtttcagaatgtcctcccattacgtatataacattgtttatggatgccactgctggattacatctaggtttcagaagactcggcatattaacccaagcagcatccccgtggaaccaacgctcaacagatgtgggatttggtagacctcctactacgtataatttattgttagcgggtatcccgctagcatacagtctggggctattcatcggaggaattggaatccaattgtttgatatataatttacagctatagcattgttatgtatttcattgttcatccatccaccgatgagatatactacttctccaacatgagtacttgtacacatatggaatatatctataatttgatccatgttcataggatactctatgaatggatacttgtatgatttgcgtggttgtttatcacaatgaaatattttggtacagtctagtatccattttacattatttatacctctgggagaaagataatttgacctgattacatttttgataaggagtagcagatttcctaatttatttcttcgcctcatataccacttaatgacaaaatcaactacataatcctcatctggaacatttagttcatcgctttctagaataagtttcatagatagataatcaaaattgtctatgatgtcatcttccagttccaaaaagtgtttggcaataaagtttttagtatgacataagagattggatagtccgtattctatacccatcatgtaacactcgacacaatattcctttctaaaatctcgtaagataaagtttatacaagtgtagatgataaattctacagaggttaatatagaagcacgtaataaattgacgacgttatgactatctatatatacctttccagtatatgagtaaataactatagaagttaaactgtgaatgtcaaggtctagacaaacccttgtaactggatctttatttttcgtgtatttttgacgtaaatgtgtgcgaaagtaaggagataactttttcaatatcgtagaattgactattatattgcctcctatggcatcaataattgttttgaatttcttagtcatagacaatgctaatatattcttacagtacacagtattgacaaatatcggcatttatgtttctttaaaagtcaacatctagagaaaaatgattatctttttgagacataactcccattttttggtattcacccacacgtttttcgaaaaaattagtttttccttccaatgatatattttccatgaaatcaaacggattggtaacattataaatttttttaaatcccaattcagaaatcaatctatccgcgacgaattctatatatgttttcatcatttcacaattcattcctataagtttaactggaagagccgcagtaagaaattcttgttcaatggatactgcatctgttataatagatctaacggtttcttcactcggtggatgcaataaatgtttaaacatcaaacatgcgaaatcgcagtgcagaccctcgtctctactaattagttcgttggaaaacgtgagtccgggcattaggccacgctttttaagccaaaatatggaagcgaatgatccagaaaagaaaattccttctactgcagcaaaggcaataagtctctctccataaccggcgctgtcatgtatccacttttgagcccaatcggccttcttttttacacaaggcatcgtttctatggcattaaagagatagtttttttcattactatctttaacataagtatcgatcaaaagactatacatttccgaatgaatgttttcaatggccatctgaaatccgtagaaacatctagcctcggtaatctgtacttctgtacaaaatcgttccgccaaattttcattcactattccgtcactggctgcaaaaaacgccaatacatgttttataaaatatttttcgtctggtgttagtttattccaatcattgatatctttagatatatctacttcttccactgtccaaaatgatgcctctgcctttttatacatgttccagatgtcatgatattggattgggaaaataacaaatctatttggatttggtgcaaggatgggttccataactaaattaacaataacaataaattttttttcagttatctatatgcctgtacttggattttttgtacatcgatatcgccgcaatcactacaataattacaagtattattgatagcattgttattagtactatcataattaaattatctacattcatgggtgctgaataatcgttattatcatcattatcattttgtaattgtgacatcatactagataaatcgtttgcgagattgttgtgggaagcgggcatggaggatgcattatcattattatttaacgccttccatttggattcacaaatgttacgcacattcaacattttatggaaactataattttgtgaaaacaaataacaagaaaactcgtcatcgttcaaatttttaacgatagtaaaccgattaaacgtcgagctaatttctaacgctagcgactctgttggatatgggtttccagatatatatcttttcagttcccctacgtatctataatcatctgtaggaaatggaagatatttccatttatctactgttcctaatatcatatgtggtggtgtagtagaaccattaagcgcgaaagatgttatttcgcatcgtattttaacttcgcaataatttctggttagataacgcactctaccagtcaagtcaatgatattagcctttacagatatattcatagtagtcgtaacgatgactccatcttttagatgcgatactcctttgtatgtaccagaatcttcgtacctcaaactcgatatatttaaacaagttaatgagatattaacgcgttttatgaatgatgatatataaccagaagttttatcctcggtggctagcgctataaccttatcattataataccaactagtgtgattaatatgtgacacgtcagtgtgggtacaaatatgtacattatcgtctacgtcgtattcgatacatccgcatacagccaacaaatataaaatgacaaatactctaacgccgttcgtacccatcttgatgcggtttaataaatgttttgatttcaatttattgtaaaaaaagattcggttttatactgttcgatattctcattgcttatattttcatctatcatctccacacagtcaaatccgtggttagcatgcacctcatcaaccggtaaaagactatcggactcttctatcattataactctagaatatttaatttggtcattattaatcaagtcaattatcttatttttaacaaacgtgagtattttactcattttttataaaaacttttagaaatatacagactctatcgtgtgtctatatcttctttttatatccaatgtatttatgtctgatttttcttcatttatcatatataatggtccaaattctacacgtgcttcggattcatccagatcattaaggttcttataattgtaacatccttctcttccctcttctacatcttccttcttattcttattcttagcgtcacagaatctaccacagcaggatcccatgacgagcgtcatattaaactaatccattttcaattataatatatgattagtaatgaccattaaaataaaaaatattcttcataaccggcaagaaagtgaaaagttcacattgaaactatgtcagtagtatacatcatgaaatgatgatatatatatactctattttggtggaggattatatgatataattcgtggataatcatttttaagacacatttctttattcgtaaatcttttcacgttaaatgagtgtccatattttgcaatttcttcatatgatggcggtgtacgtggacgaggctgctcctgttcttgttgtggtcgccgactgtcgtgtctgcgtttagatccctccattatcgcgattgcgtagatggagtactattttataccttgtaattaaatttttttattaattaaacgtataaaaacgttccgtatctgtatttaagagccagatttcgtctaatagaacaaatagctacagtaaaaataactagaataattgctacacccactagaaaccacggatcgtaatacggcaatcggttttcgataataggtggaacgtatattttatttaaggacttaacaattgtctgtaaaccacaatttgcttccgcggatcctgtattaactatctgtaaaagcatatgttgaccgggcggagccgaacattctccgatatctaatttctgtatatctataatattattaacctccgcatacgcattacagttcttttctagcttggataccgcactaggtacatcgtctagatctattcctatttcctcagcgatagctcttctatccttttccggaagcaatgaaatcacttcaataaatgattcaaccatgagtgtgaaactaagtcgagaattactcatgcatttgttagttattcggagcgcgcaatttttaaactgtcctataacctctcctatatgaatagcacaagtgacattagtagggatagaatgttgagctaatttttgtaaataactatctataaaaagattatacaaagttttaaactctttagtttccgccatttatccagtctgagaaaatgtctctcataataaatttttccaagaaactaattgggtgaagaatggaaacctttaatctatatttatcacagtctgttttggtacacatgatgaattcttccaatgccgtactaaattcgatatctttttcgatttctggatatgtttttaataaagtatgaacaaagaaatggaaatcgtaataccagttatgtttaactttgaaattgttttttattttcttgttaatgattccagccacttgggaaaagtcaaagtcgtttaatgccgatttaatacgttcattaaaaacaaactttttatcctttagatgaattattattggttcattggaatcaaaaagtaagatattatcgggtttaagatctgcgtgtaaaaagttgtcgcaacagggtagttcgtagattttaatgtataacagagccatctgtaaaaagataaactttatgtattgtaccaaagatttaaatcctaatttgatagctaactcggtatctactttatctgccgaatacagtgctaggggaaaaattataatgtttcctctttcatattcgtagttagttctcttttcatgttcgaaaaagtgaaacatgcggttaaaatagtttataacattaatattactgttaataactgccggataaaagtgggatagtaatttcacgaatttgatactgtcctttctctcgttaaacgcctttaaaaaaactttagaagaatatctcaatgagagttcctgaccatccatagtttgtatcaataatagcaacatatgaagaacacgtttatacagagtatgtaaaaatgttaatttatagtttaatcccatggcccacgcacacacgattaattttttttcatctccctttagattgttgtatagaaatttgggtactgtgaactccgccgtagtttccatgggactatataattttgtggcctcgaatacaaattttactacatagttatctatcttaaagactataccatatcctcctgtagatatgtgataaaaatcgtcgtttataggataaaatcgtttatccttttgttggaaaaaggatgaattaatgtaatcattctcttctatctttagtagtgtttccttattaaaattcttaaaataatttaacaatctaactgacggagcccaattttggtgtaaatctaattgggacattatattgttaaaatacaaacagtctcctaatataacagtatctgataatctatggggagacatccattgatattcaggggatgaatcattggcaacacccatttattgtacaaaaagccccaatttacaaacgaaagtccaggtttgatagagacaaacaattaactattttgtctctgtttttaacacctccacagtttttaatttctttagtaatgaaattattcacaatatcagtatcttctttatctaccagagattttactaacttgataaccttggctgtctcattcaatagggtagtaatatttgtatgtgtgatattgatatctttttgaattgtttcttttagaagtgattctttgatggtgccagcatacgaattacaataatgcagaaactcggttaacatgcaggaattatagtaagccaattccaattgttgcctgtgttgtattagagtgtcaatatgagcaatggtgtccttgcgtttctctgatagaatgcgagcagcgattttggcgttatcatttgacgatatttctggaatgacgaatcctgtttctactaactttttggtaggacaaagtgaaacaatcaagaagatagcttctcctcctatttgtggaagaaattgaactcctctagatgatctactgacgatagtatctccttgacagatattggaccgaattacagaagtacctggaatgtaaagccctgaaaccccctcattttttaagcagattgttgccgtaaatcctgcactatgcccaagatagagagctcctttggtgaatccatctctatgtttcagtttaaccaagaaacagtcagctggtctaaaatttccatctctatctaatacagcatctaacttgatgtcaggaactatgaccggtttaatgttatatgtaacattgagtaaatccttaagttcataatcatcactgtcatcagttatgtacgatccaaacaatgtttctaccggcatagtggatacgaagatgctatccatcagaatgtttccctgattagtattttctatatagctattcttctttaaacgattttccaaatcagtaactatgttcatttttttaggagtaggacgcctagccagtatggaagaggattttctagatcctctcttcaacatctttgatctcgatggaatgcaaaaccccatagtgaaacaaccaacgataaaaataatattgtttttcactttttataattttaccatctgactcatggattcattaatatctttataagagctactaacgtataattctttataactgaactgagatatatacaccggatctatggtttccataattgagtaaatgaatgctcggcaataactaatggcaaatgtatagaacaacgaaattatactagagttgttaaagttaatattttctatgagctgttccaataaattatttgttgtgactgcgttcaagtcataaatcatcttgatactatccagtaaaccgtttttaagttctggaatattatcatcccattgtaaagcccctaattcgactatcgaatatcctgctctgatagcagtttcaatatcgacggacgtcaatactgtaataaaggtggtagtattgtcatcatcgtgataaactacgggaatatggtcgttagtaggtacggtaactttacacaacgcgatatataactttccttttgtaccatttttaacgtagttgggacgtcctgcagggtattgttttgaagaaatgatatcgagaacagatttgatacgatatttgttggattcctgattattcactataatataatctagacagatagatgattcgataaatagagaaggtatatcgttggtaggataatacatccccattccagtattctcggatactctattgatgacactagttaagaacatgtcttctattctagaaaacgaaaacatcctacatggactcattaaaacttctaacgctcctgattgtgtctcgaatgcctcgtacaaggatttcaaggatgccatagattctttgaccaacgatttagaattgcgtttagcatctgatttttttattaaatcgaatggtcggctctctggtttgctaccccaatgataacaatagtcttgtaaagataaaccgcaagaaaatttatacgcatccatccaaataaccctagcaccatcggatgatattaatgtattattatagattttccatccacaattattgggccagtatactgttagcaacggtatatcgaatagattactcatgtaacctactagaatgatagttcgtgtactagtcataatatctttaatccaatctaaaaaatttaaaattagattttttacactgttaaagttaacaaaagtattacccgggtacgtggatatcatatatggcattggtccattatcagtaatagctccataaactgatacggcgatggtttttatatgtgtttgatctaacgaggaagaaattcgcgcccacaattcatctctagatatgtatttaatatcaaacggtaacacatcaatttcgggacgcgtatatgtttctaaatttttaatccaaatataatgatgacctatatgccctattatcatactgtcaactatagtacacctagggaacttacgatacatctgtttcctataatcgttaaattttacaaatctataacatgctaaaccttttgacgacagccattcattaatttctgatatggaatctgtattctcgataccgtatcgttctaaagccagtgctatatctccctgttcgtgggaacgctttcgtataatatcgatcaacggataatctgaagtttttggagaataatatgactcatgatctatttcgtccataaacaatctagacataggaattggaggcgatgatcttaattttgtgcaatgagtcgtcaatcctataacttctaatcttgtaatattcatcatcgacataatactatctatgttatcatcgtatattagtataccatgaccttcttcatttcgtgccaaaatgatatacagtcttaaatagttacgcaatatctcaatagtttcataattgttagctgttttcatcaaggtttgtatcctgtttaacatgatggcgttctataacgtctctattttctatttttaattttttaaatttttaacgatttactgtggctagatacccaatctctctcaaatatttttttagcctcgcttacaagctgtttatctatactattaaaactgacgaatccgtgattttggtaatgggttccgtcgaaatttgccgaagtgatatgaacatattcgtcgtcgactatcaacaattttgtattattctgaatagtgaaaaccttcacagatagatcattttgaacacacaacgcatctagacttttggcggttgccatagaatatacgtcgttcttatcccaattaccaactagaagtctgatcttaactcctctattaatggctgcttctataatggagttgtaaatgtcgggccaatagtagctattaccgtcgacacgtgtagtgggaactatggccaaatgttcaatatctatactagtcttagctgacctgagtttatcaataactacatcggtatctagatctctagaatatcccaataggtgttccggagaatcagtaaagaacactccacctataggattcttaatatgatacgcagtgctaactggcaaacaacaagccgcagagcataaattcaaccatgaattttttgcgctattaaaggctttaaaagtatcaaatcttctacgaagatctgtggccagcgggggataatcagaatatacacctaacgttttaatcgtatgtatagatcctccagtaaatgacgcgtttcctacataacatctttcatcatctgacacccaaaaacaaccgagtagtagtcccacattattttttttatctatattaacggttataaaatttatatccgggcagtgactttgtagctctcccagatttcttttccctcgttcatctagcaaaactattattttaatccctttttcagatgcctcttttagtttatcaaaaataagcgctcccctagtcgtactcagaggattacaacaaaaagatgctatgtatatatatttcttagctagagtgataatttcgttaaaacattcaaatgttgttaaatgatcggatctaaaatccatattttctggtagtgtttctaccagcctacattttgctcccgcaggtaccgatgcaaatggccacatttagttaacataaaaacttatacatcctgttctatcaacgattctagaatatcatcggctatatcgctaaaattttcatcaaagtcgacatcacaacctaactcagtcaatatattaagaagttccatgatgtcatcttcgtctatttctatatccgtatccattgtagattgttgaccgattatcgagtttaaatcattactaatactcaatccttcagaatacaatctgtgtttcattgtaaatttataggcggtgtatttaagttggtagattttcaattatgtattaatatagcaacagtagttcttgctcctccttgattctagcatcctcttcattattttcttctacgtacataaacatgtccaatacgttagacaacacaccgacgatggcggccgctacagacacgaatatgactaaaccgatgaccatttaaaaacccctctctagctttcacttaaactgtatcgatcattcttttagcacatgtataatataaaaacattattctatttcgaatttaggcttccaaaaatttttcatccgtaaaccgataataatatatatagacttgttaatagtcggaataaatagattaatgcttaaactatcatcatctccacgattagagatacaatatttacattctttttgctgtttcgaaactttatcaatacacgttaatacaaacccaggaaggagatattgaaactgaggctgttgaaaatgaaacggtgaatacaataattcagataatgtaaaatcatgattccgtattctgatgatattagaactgctaatggatgtcgatggtatgtatctaggagtatctattttaacaaagcatcgatttgctaatatacaattatccttttgattaattgttattttattcatattcttaaaaggtttcatatttatcaattcttctacattaaaaatttccatttttaatttatgtagccccgcaatactcctcattacgtttcattttttgtctataatatccattttgttcatctcggtacatagattatccaattgagaagcgcatttagtagttttgtacattttaagtttattgacgaatcgtcgaaaactagttatagttaacattttattatttgataccctgatattaatacccctgccgttactattatttataactgatgtaatccacgtaacattggaattaactatcgatagtaatgcatcgacgcttccaaaattgtctattataaactcaccgataatttttttattgcatgttttcatattcattaggattatcaaatctttaatcttattacgattgtatgcgttgatattacaagacgtcattctaaaagacggaggatctccatcaaatgccagacaatcacgtacaaagtacatggaaataggttttgttctattgcgcatcatagatttatatagaacacccgtagaaatactaatttgttttactctataaaatactaatgcatctatttcatcgttttgtataacgtctttccaagtgtcaaattccaaatttttttcattgatagtaccaaattcttctatctctttaactacttgcatagataggtaattacagtgatgcctacatgccgttttttgaaactgaatagatgcgtctagaagcgatgctacgctagtcacaatcaccactttcatatttagaatatatatatgtaaaaatatagtagaatttcattttgtttttttctatgctataaatgaattctcattttgcatctgctcatactccgttttatattaataccaaagaaggaagatatctggttctaaaagccgttaaagtatgcgatgttagaactgtagaatgcgaaggaagtaaagcttcctgcgtactcaaagtagataaaccctcatcgcccgcgtgtgagagaagaccttcgtccccgtccagatgcgagagaatgaataaccctggaaaacaagttccgtttatgaggacggacatgctacaaaatatgttcgcggctaatcgcgataatgtagcttctagacttttgtcctaaaatactattatatccttttcgatattaataaatccgtgtcgtccaggttttttatctctttcagtatgtgaatagataggtattttatctctattcatcatcgaatttaagagatccgataaacattgtttgtattctccagatgtcagcatctgatacaacaatatatgtgcacataaacctctggcacttatttcatgtaccttccccttatcactaaggagaatagtatttgagaaatatgtatacatgatattatcatgaattagatatacagaatttgtaacactctcgaaatcacacgatgtgtcggcgttaagatctaatatatcactcgataacacattttcatctagatacactagacattttttaaagctaaaatagtctttagtagtaacagtaactatgcgattattttcatcgatgatacatttcatcggcatattattacgcttaccatcaaagactataccatgtgtatatctaacgtattctagcatggttgccatacgcgcattaaacttttcaggatctttggatagatcttccaatctatctatttgagaaaacatttttatcatgttcaatagttgaaacgtcggatccactatatagatattatctataaagattttaggaactacgttcatggtatcctggcgaatattaaaactatcaatgatatgattatcgttttcatcttttatcaccatatagtttctaagatatgggattttacttaatataatattatttcccgtgataaattttattagaaaggccaaatctataagaaaagtcctagaattagtctgaagaatatctatatcgccgtatagtatatttggattaattagatatagagaatatgatccgtaacatatacaacttttattatggcgtctaagatattcttccatcaacttattaacatttttgactagggaagatacattatgacgtcccattacttttgccttgtctattactgcgacgttcatagaatttagcatatctcttgccaattcttccattgatgttacattataagaaattttagatgaaattacatttggagctttaatagtaagaactcctaatatgtccgtgtatgtggtcactaatacagattgtagttctataatcgtaaataatttacctatattatatgtttgagtctgtttagaaaagtagctaagtatacgatcttttatttctgatgcagatgtattaacatcggaaaaaaatctttttttattcttttttactaaagatacaaatatgtctttgttaaaaacagttattttctgaatatttctagcttgtaattttaacatatgatattcgttcacactaggtactctgcctaaataggtttctataatctttaatgtaatattaggaaaagtattctgatcaggattcctattcattttgaggatttaaaactctgattattgtctaatatggtctctacgcaaactttttcacagagcgatagagtttttgataactcgtttttcttaagaaatataaaactactgtctccagagctcgctctatcttttattttatctaattcgatacaaactcctgatactggttcagaaagtaattcattaattttcagtcctttatagaagatatttaatatagataatacaaaatcttcagtttttgatatcgatctgattgatcctagaactagatatattaataacgtgctcattaggcagtttatggcagcttgataattagatatagtatattccagttcatatttattagataccgcattgcccagattttgatattctatgaattcctctgaaaataaatccaaaataactagacattctattttttgtggattagtgtactctcttccctctatcatgttcactactggtgtccacgatgataaatatctagagggaatataatatagtccataggatgccaatctagcaatgtcgaataactgtaattttattcttcgctcttcattatgaattgattcttgaggtataaacctaacacaaattatattattagacttttcgtatgtaatgtctttcatgttataagtttttaatcctggaatagaatctattttaatgaggcttttaaacgcagagttctccaacgagtcaaagcataatactctgttgtttttcttatatacgatgttacgattttcttctttgaatggaataggtttttgaattagtttataattacaacataatagataaggaagtgtgcaaatagtacgcggaaaaaacataatagctcccctgttttcatccatggttttaagtaaatgatcactggcttctttagtcaatggatattcgaacattaaccgtttcatcatcattggacagaatccatatttcttaatgtaaagagtgatcaaatcattgtgtttattgtaccatcttgttgtaaatgtgtattcggttatcggatctgctcctttttctattaaagtatcgatgtcaatctcgtctaagaattcaactatatcgacatatttcatttgtatacacataaccattactaacgtagaatgtataggaagagatgtaacgggaacagggtttgttgattcgcaaactattctaatacataattcttctgttaatacgtcttgcacgtaatctattatagatgccaagatatctatataattattttgtaagatgatgttaactatgtgatctatataagtagtgtaataattcatgtattttgatatatgttccaactctgtctttgtgatgtctagtttcgtaatatctatagcatcctcaaaaaatatattcgcatatattcccaagtcttcagttctatcttctaaaaaatcttcaacgtatggaatataataatctattttacctcttctgatatcattaatgatatagtttttgacactatcttctgtcaattgattcttattcactatatctaagaaacggatagcgtccctaggacgaactactgccattaatatctctattatagcttctggacataattcatctattataccagaattaatgggaactattccgtatctatctaacatagttttaagaaagtcagaatctaagacttgatgttcatatattggttcatacatgaaatgatctctattgatgatagtgactatttcattctctgaaaattggtaactcattctatatatgctttccttgttgatgaaggatagaatatactcaatagaatttgtaccaacaaactgttctcttatgaatcgtatatcatcatctgaaataatcatgtaaggcatacatttaacaattagagacttgtctcctgttatcaatatactattcttgtgataatttatgtgtgaggcaaatttgtccacgttctttaattttgttatagtagatatcaaatccaatggagctacagttcttggcttaaacagatatagtttttctggaacaaattctacaacattattataaaggactttgggtagataagtgggatgaaatcctattttaattaatgcgatagccttgtcctcgtgcagatatccaaacgcttttgtgatagtatggcattcattgtctagaaacgctctacgaatatctgtgacagatatcatctttagagaatatactagtcgcgttaatagtactacaatttgtattttttaatctatctcaataaaaaaattaatatgtatgattcaatgtataactaaactactaactgttattgataactagaatcagaatctaatgatgacgtaaccaagaagtttatctactgccaatttagctgcattatttttagcatctcgtttagattttccatcggccttatcgaatactcttccgtcgatgtctacacaggcataaaatgtaggagagttactaggcccaactgattcaatacgaaaagaccaatctctcctagtaatttggcagtactcattaataacggtgacagggttagcatctttccaatcaataatttttttagccggaataacatcatcaaaagacttatgatcctctctcattgatttttcgcgggatacatcatctattatgacgtcagccatagcatcagcatccggcttatccgcctccgttgtcataaaccaacgaggaggaatatcgtcggagctgtacaccatagcactacgttgaagatcgtacagagctttattaacttctcgcttctccatattaagttgtctagttagttgtgcagcagtagctccttcgattccaatgtttttaatagccgcacacacaatctctgcgtcagaacgctcgtcaatatagatcttagacatttttagagagaactaacgcaaccagcaataaaactgaacctactttatcatttttttattcatcatcctctggtggttcgtcgttcctatcaaatgtagctctgattaacccgtcatctataggtgatgctggttctggagattctggaggagatggattattatctggaagaatctctgttatttccttgttttcatgtatcgattgcgttgtaacattaagattgcgaaatgctctaaatttgggaggcttaaagtgttgtttgcaatctctacacgcgtgtctaactagtggaggttcgtcagctgctctagtttgaatcatcatcggcgtagtattcctacttttacagttaggacacggtgtattgtatttctcgtcgagaacgttaaaataatcgttgtaactcacatcctttattttatctatattgtattctactcctttcttaatgcattttataccgaataagagatagcgaaggaattctttttcggtgccgctagtacccttaatcatatcacatagtgttttatattccaaatttgtggcaatagacggtttatttctatacgatagtttgtttctggaatcctttgagtattctataccaatattattctttgattcgaatttagtttcttcgatattagattttgtattacctatattcttgatgtagtactttgatgatttttccatggcccattctattaagtcttccaagttggcatcatccacatattgtgatagtaattctcggatatcagtagcggctaccgccattgatgtttgttcattggatgagtaactactaatgtatacattttccatttataacacttatgtattaactttgttcatttatattttttcattattatgttgatattaacaaaagtgaatatatatatgttaataattgtattgtggttatacggctacaattttataatgagtgaaagtcagtgtccgatgatcaatgacgatagctttactctgaaaagaaagtatcaaatcgatagtgcggagtcaacaataaaaatggataagaagaggataaagtttcagaatagagccaaaatggtaaaagaaataaatcagacaataagagcagcacaaactcattacgagacattgaaactaggatacataaaatttaagagaatgattatgactactactctagaagatatagcaccatctattccaaataatcagaaaacttataaactattctcggacatttcagccatcggcaaagcatcacagaatccgagtaagatggtatatgctctgctgctttacatgtttcccaatttgtttggagatgatcatagattcattcgttatagaatgcatccaatgagtaaaatcaaacacaagatcttctctcctttcaaacttaatcttattagaatattagtggaagaaagattctataataatgaatgcagatctaataaatggagaataattggaacacaagttgataaaatgttgatagctgaatctgataaatatacaatagatgcaaggtataacctaaaacccatgtatagaatcaagggagaatctgaagaagataccctctttatcaaacagatggtagaacaatgtgtgacatcccaggaattggtggaaaaagtgttgaagatactgtttagagatttgttcaagagtggagaatacaaagcgtacagatacgatgatgatgtagaaaatggatttattggattggatacactaaaattaaacattgttcatgatatagttgaaccatgtatgcctgttcgtaggccagtggctaagatactgtgtaaagaaatggtaaataaatactttgagaatccgctacatattattggtaaaaatcttcaagagtgcattgactttgttagtgaataggcatttcatctttctccaatactaattcaaattgttaaattaataatggatagtataaatagttattagttataagatagtaaaaataattattagaataagagtgtagtatcatagataactctcttctataaaaatggattttattcgtagaaagtatcttatatacacagtagaaaataatatagattttttaaaggatgatacattaagtaaagtaaacaattttaccctcaatcatgtactagctctcaagtatctagttagcaattttcctcaacacgttattactaaggatgtattagctaataccaatttttttgttttcatacatatggtacgatgttgtaaagtgtacgaagcggttttacgacacgcatttgatgcacccacgttgtacgttaaagcattgactaagaattatttatcgtttagtaacgcaatacaatcgtacaaggaaaccgtgcataaactaacacaagatgaaaaatttttagaggttgccgaatacatggacgaattaggagaacttataggcgtaaattatgacttagttcttaatccattatttcacggaggggaacccatcaaagatatggaaatcatttttttaaaactgtttaagaaaacagacttcaaagttgttaaaaaattaagtgttataagattacttatttgggcatacctaagcaagaaagatacaggcatagagtttgcggataatgatagacaaaatatatacactctatttcaacaaactggtagaatcgtccatagcaatctaacagaaacgtttagagattatatctttcccggagataagactagctattgggtgtggttaaacgaaagtatagctaatgatgcggatatcgttcttaatagacacgccattaccatgtatgataaaattcttagttatatatactctgagataaaacaaggacgcgttaataaaaacatgcttaagttagtttatatctttgagcctgaaaaagatatcagagaacttctgctagaaatcatatatgatattcctggagatatcctatctattattgatgcaaaaaacgacgattggaaaaaatattttattagtttttataaagctaattttattaacggtaatacatttattagtgatagaacgtttaacgaggacttattcagagttgttgttcaaatagatcccgaatatttcgataatgaacgaattatgtctttattctctacgagtgctgcggacattaaacgatttgatgagttagatattaataacagttatatatctaatataatttatgaggtgaacgatatcacattagatacaatggatgatatgaagaagtgtcaaatctttaacgaggatacgtcgtattatgttaaggaatacaatacatacctgtttttgcacgagtcggatcccatggtcatagagaacggaatactaaagaaactgtcatctataaaatccaagagtagacggctgaacttgtttagcaaaaacattttaaaatattatttagacggacaattggctcgtctaggtcttgtgttagatgattataaaggagacttgttagttaaaatgataaaccatcttaagtctgtggaggatgtatccgcattcgttcgattttctacagataaaaaccctagtattcttccatcgctaatcaaaactattttagctagttataatatttccatcatcgtcttatttcaaaggtttttgagagataatctatatcatgtagaagaattcttggataaaagcatccatctaaccaagacggataagaaatatatacttcaattgataagacacggtagatcatagaacagaccaaatatattattaataatttgtatatacatagatataattatcacacatttttgataaatgggaactgctgcaacaattcagactcccaccaaattaatgaataaagaaaatgcagaaatgattttggaaaaaattgttgatcatatagttatgtatattagtgacgaatcaagtgattcagaaaataatcctgaatatattgattttcgtaacagatacgaagactatagatctctcattataaaaagtgatcacgagtttgtaaagctatgtaaaaatcatgcggagaaaagttctccagaaacgcaacaaatgattatcaaacacatatacgaacaatatcttattccagtatctgaagtactattaaaacctataatgtccatgggtgacataattacatataacggatgtaaagacaatgaatggatgctagaacaactctctaccctaaactttaacaatctccgcacatggaactcatgtagcataggcaatgtaacgcgtctgttttatacattttttagttatctgatgaaagataaactaaatatataagtataatcccattctaatactttaacctgatgtattagcatcttattagaatattaacctaactaaaagacataacataaaaactcattacatagttgataaaaagcggtaggatataaatattatggctgccaccgttccgcgttttgacgacgtgtacaaaaatgcacaaagaagaattctagatcaagaaacattttttagtagaggtctaagtagaccgttaatgaaaaacacatatctatttgataattacgcgtatggatggataccagaaactgcaatttggagtagtagatacgcaaacctagatgctagtgactattatcccatttcgttgggattacttaaaaagttcgagtttctcatgtctctatataaaggtcctattcccgtatatgaagaaaaagtaaatactgaattcatagccaatggatcgttctctggtagatacgtatcatatcttcgaaagttttctgcccttccaacaaacgagtttattagttttttgttactgacttccattccaatctataatatcttgttctggtttaaaaacacacagtttgatattactaaacacacattattcagatacgtctatacagataatgccaaacacctggcgttggctaggtatatgcatcaaacaggagactataagcctttgtttagtcgtctcaaagagaattatatatttaccggtcccgttccaataagtatcaaagatatagatcaccctaatcttagtagagcaagaagtccatccgattatgagacattagctaatattagtactatattgtactttaccaagtatgatccggtattaatgtttttattgttttacgtacctgggtattcaattactacaaaaattactccagccgtagaatatctaatggataaactgaatctaacaaagagcgacgtacaactgttgtaaattattttatgcttcgtaaaatgtaggttttgaaccaaacattctttcaaagaatgagatgcataaaactttattatccaatagattgactatttcggacgtcaatcgtttaaagtaaacttcgtaaaatattctttgatcactgccgagtttaaaacttctatcgataattgtctcatatgttttaatatttacaagttttttggtccatggtacattagccggacaaatatatgcaaaataatatcgttctccaagttctatagtttctggattatttttattatattcagtaactaaatacatattagggttatctgcggatttataatttgagtgatgcattctactcaacataaataattctagaggagacgatctactatcaaattcggatcgtaaatctgtttctaaagaacggagaatatctatacatacctgattagaattcatccgtccttcagacaacatctcagacagtctggttttgtacatcttaatcatattcttatgaaacttggaaacatctcttctagtttcactagtacctttattaattctctcaggtacagattttgaattcgacgatgctgagtatttcatcgttgtatatttcttcttcgattgcataatcagattcttatataccgcctcaaactctattttaaaattattaaacaatactctattattaatcagtcgttctaactctttcgctatttctatagacttatctacatcttgactgtctatctctgtaaacacggagtcggtatctccatacacgctacgaaaacgaaatctgtaatctataggcaacgatgttttcacaatcggattaatatctctatcgtccatataaaatggattacttaatggattggcaaaccgtaacataccgttagataactctgctccatttagtaccgattctagatacaagatcattctacgtcctatggatgtgcaactcttagccgaagcgtatgagtatagagcactatttctaaatcccatcagaccatatactgagttggctactatcttgtacgtatattgcatggaatcatagatggccttttcagttgaactggtagcctgttttagcatctttttatatctggctctctctgccaaaaatgttcttaatagtctaggaatggttccttctatcgatctatcgaaaattgctatttcagagatgaggttcggtagtctaggttcacaatgaaccgtaatatatctaggaggtggatatttctgaagcaatagctgattatttatttcttcttccaatctattggtactaacaacgacaccgactaatgtttccggagatagatttccaaagatacacacattaggatacagactgttataatcaaagattaatacattattactaaacattttttgttttggagcaaataccttaccgccttcataaggaaacttttgttttgtttctgatctaactaagatagttttagtttccaacaatagctttaacagtggacccttgatgactgtactcgctctatattcgaataccatggattgaggaagcacatatgttgacgcacccgcgtctgtttttgtttctactccataatactcccacaaatactgacacaaacaagcatcatgaatacagtatctagccatatctaaagctatgtttagattataatccttatacatctgagctaaatcaacgtcatcctttccgaaagataatttatatgtatcattaggtaaagtaggacataatagtacgactttaaatccattttcccaaatatctttacgaattactttacatataatatcctcatcaacagtcacataattacctgtggttaaaacctttgcaaatgcagcggctttgcctttcgcgtctgtagtatcgtcaccgatgaacgtcatttctctaactcctctatttaatactttacccatgcaactgaacgcgttcttggatatagaatccaatttgtacgaatccaatttttcaaatttttgaatgaatgaatatagatcgaaaaatatagttccattattgttattaacgtgaaacgtagtattggccatgccgcctactcccttatgactagactgatttctctcataaatacagagatgtacagcttcctttttgtccggagatctaaagataattttctctcctgttaataactctagacgattagtaatatatctcagatcaaagttatgtccgttaaaggtaacgacgtagtcgaacgttagttccaacaattgtttagctattcgtaacaaaactatttcagaacatagaactagttctcgttcgtaatccatttccattagtgactgtatcctcaaacatcctctatcgacggcttcttgtatttcctgttccgttaacatctcttcattaatgagcgtaaacaataatcgtttaccacttaaatcgatataacagtaacttgtatgcgagattgggttaataaatacagaaggaaacttcttatcgaagtgacactctatatctagaaataagtacgatcttgggatatcgaatctaggtatttttttagcgaaacagttacgtggatcgtcacaatgataacatccattgttaatctttgtcaaatattgctcgtccaacgagtaacatccgtctggagatatcccgttagaaatataaaaccaactaatattgagaaattcatccatggtggcattttgtatgctgcgtttctttggctcttctatcaaccacatatctgcgacggagcattttctatctttaatatctagattataacttattgtctcgtcaatgtctatagttctcatctttcccaacggcctcgcattaaatggaggaggagacaatgactgatatatttcgtccgtcactacgtaataaaagtaatgaggaaatcgtataaatacggtctcgccatttcgacatctggatttcagatataaaaatctgttttcaccgtgactttcaaaccaattaatgcaccgaacatccatttatagaatttagaaatatattttcatttaaatgaatcccaaacattggggaagagccgtatggaccattatttttatagtactttcgcaagcgggtttagacggcaacatagaagcgtgtaaacgaaaactatatactatagttagcactcttccatgtcctgcatgtagacggcacgcgactatcgctatagaggacaataatgtcatgtctagcgatgatctgaattatatttattattttttcatcagattatttaacaatttggcatctgatcccaaatacgcgatcgatgtgacaaaggttaaccctttataaacttaacccattataaaacttatgattagtcacaactgaaataaccgcgtgattattttttggtataattctacacggcatggtttctgtgactatgaattcaacccccgttacattagtgaaatctttaacaaacagcaagggttcgtcaaagacataaaactcattgtttacaatcgaaatagaccccctatcacacttaaaataaaaaatatccttatcctttaccaccaaataaaattctgattggtcaatgtgaatgtattcacttaacagttccacaaatttatttattaactccgaggcacatacatcgtcggtattttttatggcaaactttactcttccagcatccgtttctaaaaaaatattaacgagttccatttatatcatccaatattattgaaatgacgttgatggacagatgatacaaataagaaggtacggtacctttgtccaccatctcctccaattcatgctctattttgtcattaactttaatgtatgaaaacagtacgccacatgcttccatgacagtgtgtaacactttggatacaaaatgtttgacattagtataattgtccaagactgtcaatctataatagatagtagctataatatattctatgatggtattgaagaagatgacaaccttggcatattgatcatttaacacagacatggtatcaacagatagcttgaatgaaagagaatcagtaattggaataagcgtcttctcgatagagtgtccgtataccaacatgtctgatattttgatgtattccattaaattatttagttttttctttttattctcgttaaacagcatttctgtcaacggaccccaacatcgttgaccgattaagttttgattgatttttccgtgtaaggcgtatctagtcagatcgtatagcctatccaataatccatcgtctgtgtgtagatcacatcgtacactttttaattctctatagaagagcgacagacatctggagcaattacagacagcaatttctttattctctacagatgtaagatacttgaagacattcctatgatgatgcagaattttggataacacggtattgatggtatctgttaccataattcctttgatggctgatagtgtcagagcacaagatttccaatctttgacaatttttagcaccattatctttgttttgatatctatatcagacagcatggtgcgtctgacaacacagggattaagacggaaagatgaaatgattctctcaacatcttcaatagataccttgctattttttctggcattatctatatgtgcgagaatatcctctagagaatcagtatcctttttgatgatagtggatctcaatgacatgggacgtttaaaccttcttattctatcaccagattgcatggtgatttgtcttctttcttttatcataatgtaatctctaaattcatcggcaaattgtctatatctaaaatcataatatgagatgtttacctctacaaatatctgttcgtccaatgttagagtatttacatcagttttgtattccaaattaaacatggcaacggatttaattttatattcctctattaagtcctcgtcgataataacagaatgtagataatcatttaatccgtcgtacatggttggaagatgcttgttgacaaaatctttaattgtcttgatgaaggtgggactatatctaacatcttgattaataaaatttataacattgtccataggatactttgtaactagttttatacacatctcttcatcggtaagtttagacagaatatcgtgaacaggtggtatattatattcatcagatatacgaagaacaatgtccaaatctatattgtttaatatattatatagatgtagcgtagctcctacaggaatatctttaactaagtcaatgatttcatcaaccgttagatctattttaaagttaatcatataggcattgatttttaaaaggtatgtagccttgactacattctcattaattaaccattccaagtcattgtgtgtaagaagattatattctatcataagcttgactacatttggtcccgataccattaaagaattcttatgatataaggaaacagattttaggtactcatctactctacaagaattttggagagccttaacgatatcagtgacgtttattatttcaggaggaaagaatctaacattgagaatatcggaattaatagcttccagatacagtgattttggcaatagtccgtgtaatccataatccagtaacacgagctggtgcttgctagacaccttttcaatgtttaatttttttgaaataagctttgataaagccttcctcgcaaattccggatacatgaacatgtcggcgacatgattaagtattgttttttcattatttttatattttctcaacaagttctcaataccccaatagatgatagaatatcacccaatgcgtccatgttgtctatttccaacaggtcgctatatccaccaatagaagtttttccaaaaaagattctaggaacagttctaccaccagtaatttgttcaaaataatcccgcaattcattttcgggtttaaattctttaatatcgacaatttcatacgctcctcttttgaaactaaacttatttagaatatccagtgcatttctacaaaaaggacatgtatacttgacaaaaattgtcactttgttattggccaacctttgttgtacaaattcctcggccattttaatatttaagtgatataaaactatctcgacttatttaactctttagtcgagatatatggacgcagatagctatatgatagccaactacagaaggcaaacgctataaaaaacataattacgacgagcatatttataaatatttttattcagcattacttgatatagtaatattaggcacagtcaaacattcaaccactctcgatacattaactctctcattttctttaacaaattctgcaatatcttcgtaaaaagattcttgaaactttttagaatatctatcgactctagatgaaatagcgttcgtcaacatactatgttttgtatacataaaggcgcccattttaacagtttctagtgacaaaatgctagcgatcctaggatcctttagaatcacatagattgacgattcgtctctcttagtaactctagtaaaataatcatacaatctagtacgcgaaataatattatccttgacttgaggagatctaaacaatctagttttgagaacatcgataagttcatcgggaatgacatacatactatctttaatagaactcttttcatccagttgaatggattcgtccttaaccaactgattaatgagatcttctattttatcattttccagatgatatgtatgtccattaaagttaaattgtgtagcgcttctttttagtctagcagccaatactttaacatcactaatatcgatatacaaaggagatgatttatctatggcattaagaattcgtttttcgacatccgtcaaaaccaattcctttttgcctgtatcatccagttttccatcctttgtaaagaaattattttctactagactattaataagactgataaggattcctccataattgcacaatccaaactttttaacaaaactagactttacgagatctacaggaatgcgtacttcaggttttttagcttgtgattttttcttttgcggacattttctagtaaccaactcatctaccatttcattgattttagcagtgaaataagctttcaatgcacgggcactgatactattgaaaacgagttgatcttcaaattccgccatttaagttcaccaaacaacttttaaatacaaatatatcaatagtagtagaataagaactataaaaaaaataataattaaccaaccccaacaaccggtattattagttgatgtggtagttttctcatcacttagaacagatttaacaatttctataaagtctgtcaaatcatcttccggagaccccataaatacaccaaatatagcggcgtacaacttatccatttatacattgaatattggcttttctttatcgctatcttcatcatattcatcatcaatatcaacaagtcccagattacgagccagatcttcttctacattttcagtcattgatacacgttcactatctccagagagtccgataacgttagccaccacttctctatcaatgattagtttcttgagcgcgaaagtaatttttgtttccgttccggatctatagaagacgataggtgtgataattgccttggccaattgtctttctcttttactgagtgattctagttcaccttctatagatctgagaatggatgattctccagtcgaaacatattctaccatggatccgtttaatttgttgatgaagatggattcatccttaaatgttttctctgtaatagtttccaccgaaagactatgcaaagaatttggaatgcgttccttgtgcttaatgtttccatagacggcttctagaagttgatacaacataggactagccgcggtaacttttatttttagaaagtatccatcgcttctatcttgtttagatttatttttataaagtttagtctctccttccaacataataaaagtggaagtcatttgactagataaactatcagtaagttttatagagatagacgaacaattagcgtattgagaagcatttagtgtaacgtattcgatacattttgcattagatttactaatcgattttgcatactctataacacccgcacaagtctgtagagaatcgctagatgcagtaggtcttggtgaagtttcaactctcttcttgattaccttactcatgattaaacctaaataattgtactttgtaatataatgatatatattttcactttatctcatttgagaataaaaatgtttttgtttaaccactgcatgatgtacagatttcggaatcgcaaaccaccagtggttttattttatccttgtccaatgtgaattgaatgggagcggatgcgggtttcgtacgtagatagtacattcccgtttttagaccgagactccatccgtaaaaatgcatactcgttagtttggaataactcggatctgctatatggatattcatagattgactttgatcgatgaaggctcccctgtctgcagccatttttatgatcgtcttttgtggaatttcccaaatagttttataaactcgcttaatatcttctggaaggtttgtattctgaatggatccaccatctgccataatcctattcttgatctcatcattccataattttctctcggttaaaactctaaggagatgcggattaactacttgaaattctccagacaatactctccgagtgtaaatattactggtatacggttccaccgactcattatttcccaaaatttgagcagttgatgcagtcggcataggtgccaccaataaactatttctaagaccgtatgttctgattttatcttttagaggttcccaattccaaagatccgacggtacaacattccaaagatcatattgtagaataccgttactggcgtacgatcctacatatgtatcgtatggtccttccttctcagctagttcacaactcgcctctaatgcaccgtaataaatggtttcgaagatcttcttatttagatcttgtgcttccaggctatcaaatggataatttaagagaataaacgcgtccgctaatccttgaacaccaataccgataggtctatgtctcttattagagatttcagcttctggaataggataataattaatatctataattttattgagatttctgacaattactttgaccacatccttcagtttgagaaaatcaaatcgcccatctattacaaacatgttcaaggcaacagatgccagattacaaacggctacctcattagcatccgcatattgtattatctcagtgcaaagattactacacttgatagttcctaaattttgttgattactctttttgttacacgcatccttataaagaatgaatggagtaccagtttcaatctgagattctataatcgctttccagacgactcgagcctttattatagatttgtatctcctttctctttcgtatagtgtatacaatcgttcgaactcgtctccccaaacattgtccaatccaggacattcatccggacacatcaacgaccactctccgtcatccttcactcgtttcataaagagatcaggaatccaaagagctataaatagatctctggttctatgttcctcgtttcctgtattctttttaagatcgaggaacgccataatatcagaatgccacggttccaagtatatggccataactccaggccgtttgtttcctccctgatctatgtatctagcggtgttattataaactctcaacattggaataataccgtttgatataccattggtaccggagatatagcttccactggcacgaatattactaattgatagacctattccccctgccattttagagattaatgcgcatcgttttaacgtgtcatagataccctctatgctatcatcgatcatgttaagtagaaaacagctagacatttggtgacgactagttcccgcattaaataaggtaggagaagcgtgcgtaaaccatttttcagaaagtagattgtacgtctcaatagctgagtctatatcccattgatgaattcctactgcgacacgcattaacatgtgctgaggtctttcaacgatcttgttgtttattttcaacaagtaggatttttccaaagttttaaaaccaaaatagttgtatgaaaagtctcgttcgtaaataataaccgagttgagtttatccttatatttgttaactatatccatggtgatacttgaaataatcggagaatgtttcccatttttaggattaacatagttgaataaatcctccatcacttcactaaatagtttttttgtttccttgtgtagatttgatacggctattctggcggctagaatggcataatccggatgttgtgtagtacaagtggctgctatttcggctgccagagtgtccaattctaccgttgttactccattatatattccttgaataaccttcatagctattttaataggatctatatgatccgtgtttaagccataacataattttctaatacgagacgtgattttatcaaacatgacattttccttgtatccatttcgtttaatgacaaacatttttgttggtgtaataaaaaaattatttaacttttcattaatagggatttgacgtatgtagcgtacaaaatgattgttcctggtatatagataaagagtcctatatatttgaaaatcgttacggctcgattaaactttaatgattgcatagtgaatatatcattaggatttaactccttgactatcatggcggcgccagaaattaccatcaaaagcattaatacagttataccgatcgcagttagaacggttatagcatccaccatttatatctaaaaattagatcaaagaatatgtgacaaagtcctagttgtatactgagaattgacgaaacaatgtttcttacatatttttttcttattagtaaccgacttaatagtaggaactggaaaactagacttgattattctataagtatagatacccttccaaataatattctctttgataaaagttccagaaaatgtagaattttttaaaaagttatcttttgctattaccaagattgtgtttagacgcttattattaatatgagtgatgaaatccacaccgcctctagatatcgcctttatttccacattagatggtaaatccaatagtgaaactatctttttaggaatgtatggactcgcgtttagaggagtaaacgtcttaggcgtcggaaaggatgattcatcaaacgaataaacaatttcacaaatggatgttaatgtattagtaggaaattttttgacgctattggaattgaagattctaatggatgatgttctacctatttcatccgataacatgttaatttccgacaccaacggttttaatatttcgatgatatacggtagtctctctttcggacttatatagcttattccacaatacgagtcattatatactccaaaaaacaaaataactagtataaaatctgtatcgaatgggaaaaacgaaattatcgacataggtatagaatccggaacattgaacgtattaatacttaattctttttctgtggtaagtaccgataggttattgacattgtatggttttaaatattctataacttgagacttgatagatattagtgatgaattgaaaattatttttatcaccacgtgtgtttcaggatcatcgtcgacgcccgtcaaccaaccgaacggagtaaaataaatatcattaatatatgctctagatattagtatttttatcaatcctttgattatcatcttctcgtaggcgaatgattccatgatcaagagtgatttaagaacatcctccggagtattaatgggcttagtaaacagtccatcgttgcaataataaaagttatccaagttaaaggatattatgcattcgtttaaagatatcacctcatctgacggagacaattttttggtaggttttagagactttgaagctacttgtttaacaaagttattcatcgtcgtctactattctatttaattttgtagttaatttatcacatatcacattaattgactttttggtccacttttccatacgtttatattcttttaatcctgcgttatccgtttccgttatatccagggatagatcttgcaagttaaatagaatgctcttaaataatgtcattttcttatccgctaaaaatttaaagaatgtataaacctttttcagagatttgaaactcttaggtggtgtcctagtacacaatatcataaacaaactaataaacattccacattcagattccaacagctgattaacttccacattaatacagcctattttcgctccaaatgtacattcgaaaaatctgaataaaacatcgatgtcacaatttgtattatccaatacagaatgtttgtgattcgtgttaaaaccatcggagaaggaatagaaataaaaattattatagtggtggaattcagttggaatattgcctccggagtcataaaaggatactaaacattgttttttatcataaattacacatttccaatgagacaaataacaaaatccaaacattacaaatctagaggtagaacttttaattttgtctttaagtatatacgataagatatgtttattcataaacgcgtcaaatttttcatgaatcgctaaggagtttaagaatctcatgtcaaattgtcctatataatccacttcggatccataagcaaactgagagactaagttcttaatacttcgattgctcatccaggctcctctctcaggctctattttcatcttgacgacctttggattttcaccagtatgtattcctttacgtgataaatcatcgattttcaaatccatttgtgagaagtctatcgccttagatactttttcccgtagtcgaggtttaaaaaaatacgctaacggtatactagtaggtaactcaaagacatcatatatagaatggtaacgcgtctttaactcgtcggttaactctttcttttgatcgagttcgtcgctactattgggtctgctcaggtgccccgactctactagttccaacatcataccgataggaatacaagacactttgccggcggttgtagatttatcatatttttccactacatatccgttacaatttgttaaaaatttagatacatctatattgctacataatccagctagtgaatatatatgacataataaattggtaaatcctagttctggtattttactaattactaaatctgtatatctttccatttatcatggaaaagaatttaccagatatcttcttttttccaaactgcgttaatgtattctcttacaaatattcacaagatgaattcagtaatatgagtaaaacggaacgtgatagtttctcattggccgtgtttccagttataaaacatagatggcataacgcacacgttgtaaaacataaaggaatatacaaagttagtacagaagcacgtggaaaaaaagtatctcctccatcactaggaaaacccgcacacataaacctaaccgcgaagcaatatatatacagtgaacacacaataagctttgaatgttatagttttctaaaatgtataacaaatacagaaatcaattcgttcgatgagtatatattaagaggactattagaagctggtaatagtttacagatattttccaattccgtaggtaaacgaacagatactataggtgtactagggaataagtatccatttagcaaaattccattggcctcattaactcctaaagcacaacgagagatattttcagcgtggatttctcatagacctgtagttttaactggaggaactggagtgggtaagacgtcacaggtacccaagttattgctttggtttaattatttatttggtggattctctactctagataaaatcactgactttcacgaaagaccagtcattctatctcttcctaggatagctttagttagattgcatagcaataccattttaaaatcattgggatttaaggtactagatggatctcctatttctttacggtacggatctataccggaagaattaataaacaaacaaccaaaaaaatatggaattgtattttctacccataagttatctctaacaaaactatttagttatggcactcttattatagacgaagttcatgagcatgatcaaataggagatattattatagcagtagcgagaaagcatcatacgaaaatagattctatgtttttaatgactgccacgttagaggatgacagggaacggctaaaagtatttttacctaatcccgcatttatacatattcctggagatacactgtttaaaattagcgaggtatttattcataataagataaatccatcttccagaatggcatacatagaagaagaaaagagaaatttagttactgctatacagatgtatactcctcctgatggatcatccggtatagtctttgtggcatccgttgcacagtgtcacgaatataaatcatatttagaaaaaagattaccgtatgatatgtatattattcatggtaaggtcttagatatagacgaaatattagaaaaagtgtattcatcacctaatgtatcgataattatttctactccttatttggaatccagcgttactatacgcaatgttacacacatttatgatatgggtagagtttttgtccccgctccttttggaggatcgcaacaatttatttctaaatctatgagagatcaacgaaaaggaagagtaggaagagttaatcctggtacatacgtctatttctatgatctgtcttatatgaagtctatacagcgaatagattcagaatttctacataattatatattgtacgctaataagtttaatctaacactccccgaagatttgtttataatccctacaaatttggatattctatggcgtacaaaggaatatatagactcgttcgatattagtacagaaacatggaataaattattatccaattattatatgaagatgatagagtatgctaaactttatgtactaagtcctattctcgctgaggagttggataactttgagaggacgggagaattaactagtattgtacgagaagccattttatctctaaatttacaaattaagattttaaattttaaacataaagatgatgatacgtatatacacttttgtaaaatattattcggtgtctataacggaacaaacgctactatatattatcatagacctctaacgggatatatgaatatgatttcagatactatatttgttcctgtagataataactaaaaatcaaactctaatgaccacatctttttttagagatgaaaaattttccacatctccttttgtagacacgactaaacattttgcagaaaaaagtttattagtgtttagataatcgtatacttcatcagtgtagatagtaaatgtgaacagataaaaggtattcttgctcaatagattggtaaattccatagaatatattaatcctttcttcttgagatcccacatcatttcaaccagagacgttttatccaatgatttacctcgtactataccacatacaaaactagattttgcagtgacgtcgtacctggtattcctaccaaacaaaattttacttttagttcttttagaaaattctaaggtagaatctctatttgccaatatgtcatctatggaattaccactagcaaaaaatgatagaaatatatattgatacatcgcagctggttttgatctactatactttaaaaacgaatcagattccataattgcctgtatatcatcagctgaaaaactatgttttacacgtattccttcggcatttctttttaatgatatatcttgtttagacaatgataaagttatcatgtccatgagagacgcgtctccgtatcgtataaatatttcattagatgttagacgcttcattaggggtatacttctataaggtttcttaatcagtccatcattggttgcgtcaagaactactatcggatgttgttgggtatctctagtgttacacatggccttactaaagtttgggtaaataactatgatatctctattaattatagatgcatatatttcattcgtcaaggatattagtatcgacttgctatcgtcattaatacgtgtaatgtaatcatataaatcatgcgatagccaaggaaaatttaaatagatgttcatcatataatcgtcgctataattcatattaatacgttgacattgactaatttgtaatatagcctcgccacgaagaaagctctcgtattcagtttcatcgataaaggataccgttaaatataactggttgccgatagtctcatagtctattaagtggtaagtttcgtacaaatacagaatccctaaaatattatctaatgttggattaatctttaccataactgtataaaatggagacggagtcataactattttaccgtttgtacttactggaatagatgaaggaataatctccggacatgctggtaaagacccaaatgtctgtttgaagaaatccaatgttccaggtcctaatctcttaacaaaaattacgatattcgatcccgatatcctttgcattctatttaccagcatatcacgaactatattaagattatctatcatgtctattctcccaccgttatataaatcgcctccgctaagaaacgttagtatatccatacaatggaatacttcatttctaaaatagtattcgttttctaattctttaatgtgaaatcgtatactagaaagggaaaaattatctttgagttttccgttagaaaagaaccacgaaactaatgttctgattgcgtccgattccgttgctgaattaatggatttacaccaaaaactcatataacttctagatgtagaagcattcgctaaaaaattagtagaatcaaaggatataagtagatgttccaacaagtgagcaattcccaagatttcatctatatcattctcgaatccgaaattagaaattcccaagtagatatcctttttcatccgatcgttgatgaaaatacgaactttattcggtaagacaatcatttactaaggagtaaaataggaagtaatgttcgtatgtcgttatcatcgtataaattaaaggtgtgttttttaccattaagtgacattataattttaccaatattggaattataatataggtgtatttgcgcactcgcgacggttgatgcatcggtaaatatagctgtatctaatgttctagtcggtatttcatcatttcgctgtctaataatagcgttttctctatctgtttccattacagctgcctgaagtttattggtcggataatatgtaaaataataagaaatacatacgaataacaaaaataaaataagatataataaagatgccatttagagatctaattttgtttaacttgtccaaattcctacttacagaagatgaggaatcgttggagatagtgtcttccttatgtagaggatttgaaatatcttataatgacttgataacttactttccagataggaaataccataaatatatttataaagtatttgaacatgtagatttatcggaggaattaagtatggaattccatgatacaactctgagagatttagtctatcttagattgtacaagtattccaagtgtatacggccgtgttataaattaggagataatctaaaaggcatagttgttataaaggacaggaatatttatattagggaagcaaatgatgacttgatagaatatctcctcaaggaatacactcctcagatttatacatattctaatgagcgcgtccccataactggttcaaaattaattctttgtggattttctcaagttacatttatggcgtatacaacgtcgcatataacaacaaataaaaaggtagatgttctcgtttccaaaaaatgtatagatgaactagtcgatccaataaattatcaaatacttcaaaatttatttgataaaggaagcggaacaataaacaaaatactcaggaagatattttattcggtaacaggtggccaaactccataggtagctttttctatttcggattttagaatttccaaattcaccagcgatttatcggttttggtgaaatccaaggatttattaatgtccacaaatgccatttgttttgtctgtggattgtatttgaaaatggaaacgatgtagttagatagatgcgctgcgaagtttcctattagggttccgcgcttcacgtcacccagcatacttgaatcaccatcctttaaaaaaaatgataagatatcaacatggagtatatcatactcgaattttaattcttctactgactcactgacattttcacaaatactacaatacggtttaccgaaaataatcagtacgttcttcatttatgggtatcaaaaacttaaaatcgttactgctggaaaataaatcactgacgatattagatgataatttatacaaagtatacaatggaatatttgtggatacaatgagtatttatatagccgtcgccaattgtgtcagaaacttagaagagttaactacggtattcataaaatacgtaaacggatgggtaaaaaagggagggcatgtaaccctttttatcgatagaggaagtataaaaattaaacaagacgttagagacaagagacgtaaatattctaaattaaccaaggacagaaaaatgttagaattagaaaagtgtacatccgaaatacaaaatgttaccggatttatggaagaagaaataaaggcagaaatgcaattaaaaatcgataaactcacatttcaaatatatttatctgattctgataacataaaaatatcattgaatgagatactaacacatttcaacaataatgagaatgttacattattttattgtgatgaacgagacgcagaattcgttatgtgtctcgaggctaaaacacatttctctaccacaggagaatggccgttgataataagtaccgatcaggatactatgctatttgcatctgctgataatcatcctaagatgataaaaaacttaactcaactgtttaaatttgttccctcggcagaggataactatttagcaaaattaacggcgttagtgaatggatgtgatttctttcctggactctatggggcatctataacacccaccaacttaaacaaaatacaattgtttagtgattttacaatcgataatatagtcactagtttggcaattaaaaattattatagaaagactaactctaccgtagacgtgcgtaatattgttacgtttataaacgattacgctaatttagacgatgtctactcgtatattcctccttgtcaatgcactgttcaagaatttatattttccgcattagatgaaaaatggaatgaatttaaatcatcttatttagaaagcgtgccgttaccctgccaattaatgtacgcgttagaaccacgcaaggagattgatgtttcagaagttaaaactttatcatcttatatagatttcgaaaatactaaatcagatatcgatgttataaaatctatatcctcgatcttcggatattctaacgaaaactgtaacacgatagtattcggcatctataaggataatttactactgagtataaataattcattttactttaacgatagtctgttaataaccaatactaaaagtgataatataataaatataggttactagattaaaaatggtgttccaactcgtgtgctctacatgcggtaaagatatttctcacgaacgatataaattgattatacgaaaaaaatcattaaaggatgtactcgtcagtgtaaagaacgaatgttgtaggttaaaattatctacacaaatagaacctcaacgtaacttaacagtgcaacctctattggatataaactaatatggatccggttaattttatcaagacatatgcgcctagaggttctattatttttattaattataccatgtcattaacaagtcatttgaatccatcgatagaaaaacatgtgggtatttattatggtacgttattatcggaacacttggtagttgaatctacctatagaaaaggagttcgaatagtcccattggatagtttttttgaaggatatcttagtgcaaaagtatacatgttagagaatattcaagttatgaaaatagcagctgatacgtcattaactttattgggtattccgtatggatttggtcatgatagaatgtattgttttaaattggtagctgactgttataaaaatgccggtattgatacatcgtctaaacgaatattgggcaaagatatttttctgagccaaaacttcacagacgataatagatggataaagatatatgattctaataatttaacattttggcaaattgattaccttaaagggtgagttaatatgcataactactcctccgttgttttttccctcgttctttttcttaacgttgtttgccatcactctcataatgtaaagatattctaaaatggtaaacttttgcatatcggacgcagaaattggtataaatgttgtaattgtattatttcccgtcaatggactagtcacagctccatcagttttatatcctttagagtatttctcactcgtgtctaacattctagagcattccatgatctgtttatcgttgatattggccggaaagatagattttttattttttattatattactattggcaattgtagatataacttctggtaaatatttttctaccttttcaatctcttctattttcaagccggctatatattctgctatattgttgctagtatcaataccttttctggctaagaagtcatatgtggtattcactatatcagttttaactggtagttccattagcctttccacttctgcagaataatcagaaattggttctttaccagaaaatccagctactataataggctcaccgatgatcattggcaaaatcctatattgtaccagattaatgagagcatatttcatttccaataattctgctagttcttgagacattgatttatttgatgaatctagttggttctctagatactctaccatttctgccgcatacaataacttgttagataaaatcagggttatcaaagtgtttagcgtggctagaatagtgggcttgcatgtattaaagaatgcggtagtatgagtaaaccgttttaacgaattatatagtctccagaaatctgtggcgttacatacatgagccgaatgacatcgaagattgtccaatatttttaatagctgctctttgtccattatttctatatttgactcgcaacaattgtagataccattaatcaccgattcctttttcgatgccggacaatagcacaattgtttagctttggactctatgtattcagaattaatagatatatctctcaatacagattgcactatacattttgaaactatgtcaaaaattgtagaacgacgctgttctgcagccatttaactttaaataatttacaaaaatttaaaatgagcatccgtataaaaatcgataaactgcgccaaattgtggcatatttttcagagttcagtgaagaagtgtctataaatgtagactcgacggatgagttaatgtatatttttgccgccttgggcggatctgtaaacatttgggcaattatacctctaagtgcatcagtgttttaccgaggagccgaaaatattgtgtttaatcttcctgtgtccaaggtaaaatcgtgtttgtgtagttttcacaatgatgccatcatagatatagaacctgatctggaaaataatctagtaaaactttctagttatcatgtagtaagtgtcgattgtaacaaggaactgatgcctattaggacagatactactatttgtctaagtatagatcaaaagaaatcttacgtgtttaattttcacaagtatgaagaaaaatgttgtggtagaaccgtcattcatctagaatggttgttgggctttatcaagtgtattagtcagcatcagcatctggctattatgtttaaagatgacaatattattatgaagactcctggtaatactgatgcgttttccagggaatattctatgactgaatgttctcaagaactacaaaagttttctttcaaaatagctatctcgtctctcaacaaactacgaggattcaaaaagagagtcaatgtttttgaaactagaatcgtaatggataatgacgataacattttaggaatgttgttttcggatagagttcaatcctttaagatcaacatctttatggcgtttttagattaatactttcaatgagataaatatgggtggcggagtaagtgttgagctccctaaacgggatccgcctccgggagtacccactgatgagatgttattaaacgtggataaaatgcatgacgtgatagctcccgctaagcttttagaatatgtgcatataggaccactagcaaaagataaagaggataaagtaaagaaaagatatccagagtttagattagtcaacacaggacccggtggtctttcggcattgttaagacaatcgtataatggaaccgcacccaattgctgtcgcacttttaatcgtactcattattggaagaaggatggaaagatatcagataagtatgaagagggtgcagtattagaatcgtgttggccagacgttcacgacactggaaaatgcgatgttgatttattcgactggtgtcagggggatacgttcgatagaaacatatgccatcagtggatcggttcagcctttaataggagtaatagaactgtagagggtcaacaatcgttaataaatctgtataataagatgcaaacattatgtagtaaagatgctagtgtaccaatatgcgaatcatttttgcattatttacgcgcacacaatacagaagatagcaaagagatgatcgattatattctaagacaacagtctgcggactttaaacagaaatatatgagatgtagttatcccactagagataagttagaagagtcattaaaatatgcggaacctcgagaatgttgggatccagagtgttcgaatgccaatgttaatttcttactaacacgtaattataataatttaggactttgcaatattgtacgatgtaataccagcgtgaacaacttacagatggataaaacttcctcattaagattgtcatgtggattaagcaatagtgatagattttctactgttcccgtcaatagagcaaaagtagttcaacataatattaaacactcgttcgacctaaaattgcatttgatcagtttattatctctcttggtaatatggatactaattgtagctatttaaatgggtgccgcggcaagcatacagacgacggtgaatacactcagcgaacgtatctcgtctaaattagaacaagaagcgaacgctagtgctcaaacaaaatgtgatatagaaatcggaaatttttatatccgacaaaaccatggatgtaacctcactgttaaaaatatgtgctctgcggacgcggatgctcagttggatgctgtgttatcagccgctacagaaacatatagtggattaacaccggaacaaaaagcatacgtgccagctatgtttactgctgcgttaaacattcagacgagtgtaaacactgttgttagagattttgaaaattatgtgaaacagacttgtaattctagcgcggtcgtcgataacaaattaaagatacaaaacgtaatcatagatgaatgttacggagccccaggatctccaacaaatttggaatttattaatacaggatctagcaaaggaaattgtgccattaaagcgttgatgcaattgacgactaaggccactactcaaatagcacctagacaagttgctggtacaggagttcagttttatatgattgttatcggtgttataatattggcagcgttgtttatgtactatgccaagcgtatgttgttcacatccaccaatgataaaatcaaacttattttagccaataaggaaaacgtccattggactacttacatggacacattctttagaacttctccgatggttattgctaccacggatatgcaaaactgaaaatatattgataatattttaatagattaacatggaagttatcgctgatcgtctagacgatatagtgaaacaaaatatagcggatgaaaaatttgtagattttgttatacacggtctagagcatcaatgtcctgctatacttcgaccattaattaggttgtttattgatatactattatttgttatagtaatttatatttttacggtacgtctagtaagtagaaattatcaaatgttgttggtggtgctagtcatcacattaactattttttattactttatactataatagtactagactgacttctaacaaacatctcacctgccataaataaatgcttgatattaaagtcttctatttctaacactattccatctgtggaaaataatactctgacattatcgctaattgacacatcggtgagtgatatgcctataaagtaataatcttctttgggcacatataccagtgtaccaggttctaacaacctatttactggtgctcctgtagcatactttttctttaccttgagaatatccatcgtttgcttggtcaatagcgatatgtgattttttatcaaccactcaaaaaagtaattggagtgttcatatcctctacgggctattgtctcatggccgtgtatgaaatttaagtaacacgactgtggtagatttgttctatagagccgattgccgcaaatagatagaactaccaatatgtctgtacaaatgttaaacattaattgattaacagaaaaaacaatgttcgttctgggaatagaaaccagatcaaaacaaaattcgttagaatatatgccacgtttatacatggaatataaaataactacagtttgaaaaataacagtatcatttaaacatttaacttgcggggttaatctcacaactttactgtttttgaactgttcaaaatatagcatcgatccgtgagaaatacgtttagccgcctttaatagaggaaatcccaccgcctttctggatctcaccaacgacgatagttctgaccagcaactcatttcttcatcatccacctgttttaacatataataggcaggagatagatatccgtcattgcaatattccttctcgtaggcacacaatctaatattgataaaatctccattctcttctctgcatttattatcttgtctcggtggctgattaggctgtggtcttggtttaggccttggtctatcgttgttgaatctattttggtcattaaatctttcatttcttcctggtatatttctatcacctcgtttggttggatttttgtctatattatcgtttgtaacatcggtacgggtattcatttatcacaaaaaaaacttctctaaatgagtctactgctagaaaacctcatcgaagaagataccatattttttgcaggaagtatatctgagtatgatgatttacaaatggttattgccggcgcaaaatccaaatttccaagatctatgctttctatttttaatatagtacctagaacgatgtcaaaatatgagttggagttgattcataacgaaaatatcacaggagcaatgtttaccacaatgtataatataagaaacaatttgggtctaggagatgataaactaactattgaagccattgaaaactatttcttggatcctaacaatgaagttatgcctcttattattaataatacggatatgactgccgtcattcctaaaaaaagtggtaggagaaagaataagaacatggttatcttccgtcaaggatcatcacctatcttgtgcattttcgaaactcgtaaaaagattaatatttataaagaaaatatggaatccgcgtcgactgagtatacacctatcggagacaacaaggctttgatatctaaatatgcgggaattaatgtcctgaatgtgtattctccttccacatccataagattgaatgccatttacggattcaccaataaaaataaactagagaaacttagtactaataaggaactagaatcgtatagttctagccctcttcaagaacccattaggttaaatgattttctgggactattggaatgtgttaaaaagaatattcctctaacagatattccgacaaaggattgattactataaatggagaatgttcctaatgtatactttaatcctgtgtttatagagcccacgtttaaacattctttattaagtgtttataaacacagattaatagttttatttgaagtattcgttgtattcattctaatatatgtattttttagatctgaattaaatatgttcttcatgcctaaacgaaaaatacccgatcctattgatagattacgacgtgctaatctagcgtgtgaagacgataaattaatgatctatggattaccatggatgacaactcaaacatctgcgttatcaataaatagtaaaccgatagtgtataaagattgtgcaaagcttttgcgatcaataaatggatcacaaccagtatctcttaacgatgttcttcgcagatgatgattcattttttaagtatttggctagtcaagatgatgaatcttcattatctgatatattgcaaatcactcaatatctagactttctgttattattattgatccaatcaaaaaataaattagaagctgtgggtcattgttatgaatctctttcagaggaatacagacaattgacaaaattcacagactttcaagattttaaaaaactgtttaacaaggtccctattgttacagatggaagggtcaaacttaataaaggatatttgttcgactttgtgattagtttgatgcgattcaaaaaagaatcctctctagctaccaccgcaatagatcctgttagatacatagatcctcgtcgtgatatcgcattttctaacgtgatggatatattaaagtcgaataaagtgaacaataattaattctttattgtcatcatgaacggcggacatattcagttgataatcggccccatgttttcaggtaaaagtacagaattaattagacgagttagacgttatcaaatagctcaatataaatgcgtgactataaaatattctaacgataatagatacggaacgggactatggacgcatgataagaataattttgaagcattggaagcaactaaactatgtgatgtcttggaatcaattacagatttctccgtgataggtatcgatgaaggacagttctttccagacattgtttaattctgtgagcgtatggcaaacgaaggaaaaatagttatagtagccgcactcgatgggacatttcaacgtaaaccgtttaataatattttgaatcttattccattatctgaaatggtggtaaaactaactgctgtgtgtatgaaatgctttaaggaggcttccttttctaaacgattgggtgaggaaaccgagatagagataataggaggtaatgatatgtatcaatcggtgtgtagaaagtgttacgtcggctcataatattatattttttatctaaaaaactaaaaataaacattgattaaattttaatataatacttaaaaatggatgttgtgtcgttagataaaccgtttatgtattttgaggaaattgataatgagttagattacgaaccagaaagtgcaaatgaggtcgcaaaaaaactgccgtatcaaggacagttaaaactattactaggagaattattttttcttagtaagttacagcgacacggtatattagatggtgccaccgtagtgtatataggatcggctcctggtacacatatacgttatttgagagatcatttctataatttaggagtgatcatcaaatggatgctaattgacggccgccatcatgatcctattttaaatggattgcgtgatgtaactctagtgactcggttcgttgatgaggaatatctacgatccatcaaaaaacaactgcatccttctaagattattttaatttctgatgtaagatccaaacgaggaggaaatgaacctagtacggcggatttactaagtaattacgctctacaaaatgtcatgattagtattttaaaccccgtggcgtctagtcttaaatggagatgcccgtttccagatcaatggatcaaggacttttatatcccacacggtaataaaatgttacaaccttttgctccttcatattcagctgaaatgagattattaagtatttataccggtgagaacatgagactgactcgagttaccaaattagacgctgtaaattatgaaaaaaagatgtactaccttaataagatcgtccgtaacaaagtagttgttaactttgattatcctaatcaggaatatgactattttcacatgtactttatgctgaggaccgtgtactgcaataaaacatttcctactactaaagcaaaggtactatttctacaacaatctatatttcgtttcttaaatattccaacaacatcaactgaaaaagttagtcatgaaccaatacaacgtaaaatatctagcaaaaattctatgtctaaaaacagaaatagcaagagatccgtacgcggtaataaatagaaacgtactactgagatatactaccgatatagagtataatgatttagttactttaataaccgttagacataaaattgattctatgaaaactgtgtttcaggtatttaacgaatcatccataaattatactccggttgatgatgattatggagaaccaatcattataacatcgtatcttcaaaaaggtcataacaagtttcctgtaaattttctatacatagatgtggtaatatctgacttatttcctagctttgttagactagatactacagaaactaatatagttaatagtgtactacaaacaggcgatggtaaaaagactcttcgtcttcccaaaatgttagagacggaaatagttgtcaagattctctatcgccctaatataccattaaaaattgttagatttttccgcaataacatggtaactggagtagagatagccgatagatctgttatttcagtcgctgattaatcaattagtagagatgagataagaacattataataatcaataatatatcttatatcttatatcttatatcttatatcttgtttagaaaaatgctaatattaaaatagctaacgctagtaatccaatcggaagccatttgatatctataatagggtatctaatttcctgatttaaatagcggacagctatattctcggtagctactcgtttggaatcacaaacattatttacatctaatttactatctgtaatggaaacgtttcccaatgaaatggtacaatccgatacattgcattttgttatatttttttttaaagaggctggtaacaacgcatcgcttcgtttacatggctcgtaccaacaataatagggtaatcttgtatctattcctatccgtactatgcttttatcaggataaatacatttacatcgtatatcgtctttgttagcatcacagaatgcataaatttgttcgtccgtcatgataaaaatttaaagtgtaaatataactattatttttatagttgtaataaaaagggaaatttgattgtatactttcggttctttaaaagaaactgacttgataaaaatggctgtaatctctaaggttacgtatagtctatatgatcaaaaagagattaatgctacagatattatcattagtcatgttaaaaatgacgacgatatcggtaccgttaaagatggtagactaggtgctatggatggggcattatgtaagacttgtgggaaaacggaattggaatgtttcggtcactggggtaaagtaagtatttataaaactcatatagttaagcctgaatttatttcagaaattattcgtttactgaatcatatatgtattcactgcggattattgcgttcacgagaaccgtattccgacgatattaacctaaaagagttatcgggacacgctcttaggagattaaaggataaaatattatccaagaaaaagtcatgttggaacagtgaatgtatgcaaccgtatcaaaaaattactttttcaaagaaaaaggtttgtttcgtcaacaagttggatgatattaacgttcctaattctctcatctatcaaaagttaatttctattcatgaaaagttttggccattattagaaattcatcaatatccagctaacttattttatacagactactttcccatccctccgttgattattagaccggctattagtttttggatagatagtatacccaaagagaccaatgaattaacttacttattaggtatgatcgttaagaattgtaacttgaatgctgatgaacaggttatccagaaggcggtaatagaatacgatgatattaaaattatttctaataacactaccagtatcaatttatcatatattacatccggcaaaaataatatgattagaagttatatcgtcgcccgacgaaaagatcagaccgctagatctgtaattggtcccagtacatctatcaccgttaatgaggtaggaatgcccgcatatattagaaatacacttacagaaaagatatttgttaatgcctttacagtggataaagttaaacaactattagcgtcaaaccaagttaaattttactttaataaacgattaaaccaattaacaagaatacgccaaggaaagtttattaaaaataaaatacatttattgcctggtgattgggtagaagtagctgttcaagaatatacaagtattatttttggaagacagccgtctctacatagatacaacgtcatcgcttcatctatcagagctaccgaaggagatactatcaaaatatctcccggaattgccaactctcaaaatgctgatttcgacggggatgaggaatggatgatattagaacaaaatcctaaagctgtaattgaacaaagtattcttatgtatccgacgacgttactcaaacacgatattcatggagcccccgtttatggatctattcaagatgaaatcgtagcagcgtattcattgtttaggatacaagatctttgtttagatgaagtattgaacatcttggggaaatatggaagagagttcgatcctaaaggtaaatgtaaattcagcggtaaagatatctatacttacttgataggtgaaaagattaattatccgggtctcttaaaggatggtgaaattattgcaaacgacgtagatagtaattttgttgtggctatgaggcatctgtcattggctggactcttatccgatcataagtcgaacgtggaaggtatcaactttattatcaagtcatcttatgtttttaagagatatctatctatttacggttttggggtgacattcaaagatctgagaccaaattcgacgttcactaataaattggaggccatcaacgtagaaaaaatagaacttatcaaagaagcatacgccaaatatctcaacgatgtaagagacgggaaaatagttccattatctaaagctttagaggcggactatgtggaatccatgttatccaacttgacaaatcttaatatccgagagatagaagaacatatgagacaaacgctgatagatgatccagataataacctcctgaaaatggccaaagcgggttataaagtaaatcccacagaactaatgtatattctaggtacgtatggacaacaaaggattgatggtgaaccagcagagactcgagtattgggtagagttttaccttactatcttccagactctaaggatccagaaggaagaggttacattcttaattctttaacaaaaggattaacgggttctcaatattacttttcgatgctggttgccagatctcaatctactgatatcgtctgtgaaacatcacgtaccggaacactggctagaaaaatcattaaaaagatggaggatatggtggtcgacggatacggacaagtagttataggtaatacgctcatcaagtacgccgccaattataccaaaattctaggctcagtatgtaaacctgtagatcttatctatccagatgagtccatgacttggtatttggaaattagtgctctgtggaataaaataaaacagggattcgtttactctcagaaacagaaacttgcaaagaagacattggcgccgtttaatttcctagtattcgtcaaacccaccactgaggataatgctattaaggttaaggatctgtacgatatgattcataacgtcattgatgatgtgagagagaaatacttctttacggtatctaatatagattttatggagtatatattcttgacgcatcttaatccttctagaattagaattacaaaagaaacggctatcactatctttgaaaagttctatgaaaaactcaattatactctaggtggtggaactcctattggaattatttctgcacaggtattgtctgagaagtttacacaacaagccctgtccagttttcacactactgaaaaaagtggtgccgtcaaacaaaaacttggtttcaacgagtttaataacttgactaatttgagtaagaataagaccgaaattatcactctggtatccgatgatatctctaaacttcaatctgttaagattaatttcgaatttgtatgtttgggagaattaaatccaaacatcactcttcgaaaagaaacagataaatatgtagtagatataatagtcaatagattatacatcaagagagcagaaataaccgaattagtcgtcgaatatatgattgaacgatttatctcctttagcgtcattgtaaaggaatggggtatggagacattcattgaggacgaggataatattagatttactgtctacctaaatttcgttgaaccggaagaattgaatcttagtaagtttatgatggttcttccgggggcagccaacaagggaaagattagtaaattcaagattcctatctctgattatacgggatatgacgacttcaatcaaacaaaaaagctcaataagatgactgtagaactcatgaatctaaaagaattgggttctttcgatttggaaaacgtcaacgtgtatcctggagtatggaatacatacgatatcttcggtatcgaggccgctcgtgaatacttgtgcgaagccatgttaaacacctatggagaagggttcgattatctgtatcagccttgtgatcttctcgctagtttactatgtgctagttacgaaccagaatcagtgaataaattcaagttcggcgcagctagtactcttaagagagctacgttcggagacaataaagcattgttaaacgcggctcttcataaaaagtcagaacctattaacgataatagtagctgccacttttttagcaaggtccctaatataggaactggatattacaaatactttatcgacttgggtcttctcatgagaatggaaaggaaactatctgataagatatcttctcaaaagatcaaggaaatggaagaaacagaagacttttaattcttatcaataacatatttttctatgatctgtcttttaaacgatggattttccacaaatgcgcctctcaagtccctcatagaatgatacacgtataaaaaatatagcataggcaatgactccttatttttagacattagatatgccaaaatcatagccccgcttctatttactcccgcagcacaatgaaccaacacgggctcgtttcgttgatcacatttagataaaaaggcggttacgtcgtcaaaatatttactaatatcggtagttgtatcatctaccaacggtatatgaataatattaatattagagttaggtaatgtatatttatccatcgtcaaatttaaaacatatttgaacttaacttcagatgatggtgcatccatagcatttttataatttcccaaatacacattattggttacccttgtcattatagtgggagatttggctttgtgcatatctccagttgaacgtagtagtaagtatttatacaaacttttcttatccatttataacgtacaaatggataaaactactttatcggtaaacgcgtgtaatttagaatacgttagagaaaaggctatagtaggcgtacaagcagccaaaacatcaacacttatattctttgttattatattggcaattagtgcgctattactctggtttcagacgtctgataatccagtctttaatgaattaacgagatatatgcgaattaaaaatacggttaacgattggaaatcattaacggatagcaaaacaaaattagaaagtgatagaggtagacttctagccgctggtaaggatgatatatttgaattcaaatgtgtggatttcggcgcctattttatagctatgcgattggataagaaaacatatctgccgcaagctattaggcgaggtactggagacgcgtggatggttaaaaaggcggcaaaggtcgatccatctgctcaacaattttgtcagtatttgataaaacacaagtctaataatgttattacttgtggtaatgagatgttaaatgaattaggttatagcggttattttatgtcaccgcattggtgttccgattttagtaatatggaatagtgttagataaatgcggtaacgaatgttcctgtaaggaaccataacagcttagatttaacgttaaagatgagcataaacataataaacaaaattacaatcaaacttataacattaatatcaaacaatccaaaaaatgaaatcagtggagtagtaaacgcgtacataactcctggataacgtttagcagctgccgttcctattctagaccaaaaattcggtttcatgttttcgaaacggtattctgcaacaagtcgaggatcgtgttctacatatttggcggcattatccagtatctgcctattgatcttcatttcgttttcgattctggctatttcaaaataaaatcccgatgatagacctccagactttataatttcatctacgatgttcagcgccgtagtaactctaataatataggctgataagctaacatcataccctcctgtatatgtgaatatggcatgatttttgtccattacaagctcggttttaactttattgcctgtaataatttctctcatctgtaggatatctatttttttgtcatgcattgccttcaagacgggacgaagaaacgtaatatcctcaataacgttatcgttttctacaataactacatattctacctttttattttctaactcggtaaaaaaattagaatcccatagggctaaatgtctagcgatatttcttttcgtttcctctgtacacatagtgttacaaaaccctgaaaagaagtgagtatacttgtcatcatttctaatgtttcctccagtccactgtataaacgcataatccttgtaatgatctggatcatccttgactaccacaacatttcttttttctggcataacttcgttgtcctttacatcatcgaacttctgatcattaatatgctcatgaacattaggaaatgtttctgatggaggtctatcaataactggcacaacaataacaggagttttcaccgccgccatttagttattgaaattaatcatatacaactctttaatacgagttatattttcgtctatccattgtttcacattgacatatttcgacaaaaagatataaaatgcgtattccaatgcttctctgtttaatgaattactaaaatatacaaacacgtcactgtctggcaataaatgatatcttagaatattgtaacaatttattttgtattgcacatgttcgtgatctatgagttcttcttcgaatggcataggatctccgaatctgaaaacgtataaataggagttagaataataatatttgagagtattggtaatatataaactctttagcggtataattagtttttttctctcaatttctatttttagatgtgatggaaaaatgactaattttgtagcattagtatcatgaactctaatcaaaatcttaatatcttcgtcacacgttagctctttgaagtttttaagagatgcatcagttggttctacagatggagtaggtgcaacaattttttgttctacacatgtatgtactggagccattgttttaactataatggtgcttgtatcgaaaaactttaatgcagatagcggaagctcttcgccgcgactttctacgtcgtaattgggttctaacgccgatctctgaatggatactagttttctaagttctaatgtgattctctgaaaatgtaaatccaattcctccggcattatagatgtgtatacatcggtaaataaaactatagtatccaacgatcccttctcgcaaattctagtcttaaccaaaaaatcgtatataaccacggagatggcgtatttaagagtggattcttctaccgttttgttcttggatgtcatataggaaactataaagtccgcactactgttaagaatgattactaacgcaactatatagtttaaattaagcattttggaaacataaaataactctgtagacgatacttgactttcgaataagtttgcagacaaacgaagaaagaacagacctctcttaatttcagaagaaaactttttttcgtattcctgacgtctagagtttatatcaataagaaagttaagaattagtcggttaatgttgtatttcattacccaagtttgagatttcataatattatcaaaagacatgataatattaaagataaagcgctgactatgaacgaaatagctatatggttcgctcaagaatatagtcttgttaaacgtggaaacgataactgtatttttaatcacgtcagcggcatctaaattaaatataggtatatttattccacacactctacaatatgccacaccatcttcataataaataaattcgttagcaaaattattaattttagtgaaatagttagcgtcaactttcatagcttccttcaatctaatttgatgctcacacggtgcgaattccactctaacatcccttttccatgcctcaggttcatcgatctctataatatctagttttttgcgtttcacaaacacaggctcgtctctcgcgatgagatctgtatagtaactatgtaaatgataactagatagaaagatgtagctatatagatgacgatcctttaagagaggtataataactttaccccaatcagatagactgttgttatggtcttcggaaaaagaatttttataaatttttccagtattttccaaatatacgtacttaacatctaaaaaatccttaatgataataggaatggataatccgtctattttataaagaaatacatatcgcacattatacttttttttggaaatgggaataccgatgtgtctacataaatatgcaaagtctaaatattttttagagaatcttagttggtccaaattcttttccaagtacggtaatagatttttcatattgaacggtatcttcttaatctctggttctagttccgcattaaatgatgaaactaagtcactatttttataactaacgattacatcacctctaacatcatcatttaccagaatactgatcttcttttgtcgtaaatacatgtctaatgtgttaaaaaaaagatcatacaagttatacgtcatttcatctgtggtattcttgtcattgaaggataaactcgtactaatctcttctttaacagcctgttcaaatttatatcctatatacgaaaaaatagcaaccagtgtttgatcatccgcgtcaatattctgttctatcgtagtgtataacaatcgtatatcttcttctgtgatagtcgatacgttataaaggttgataacgaaaatatttttatttcgtgaaataaagtcatcgtaggattttggacttatattcgcgtctagtagatatgcttttatttttggaatgatctcaattagaatagtctctttagagtccatttaaagttacaaacaactaggaaattggtttatgatgtataatttttttagtttttatagattctttattctatacttaaaaaatgaaaataaatacaaaggttcttgagggttgtgttaaattgaaagcgagaaataatcataaattatttcattatcgcgatatccgttaagtttgtatcgtaatggcgtggtcaattacgaataaagcggatactagtagcttcacaaagatggctgaaatcagagctcatctaaaaaatagcgctgaaaataaagataaaaacgaggatattttcccggaagatgtaataattccatctactaagcccaaaaccaaacgagccactactcctcgtaaaccagcggctactaaaagatcaaccaaaaaggaggaagtggaagaagaagtagttatagaggaatatcatcaaacaactgaaaaaaattctccatctcctggagtcagcgacattgtagaaagcgtggccgctgtagagctcgatgatagcgacggggatgatgaacctatggtacaagttgaagctggtaaagtaaatcatagtgctagaagcgatctctctgacctaaaggtggctaccgacaatatcgttaaagatcttaagaaaattattactagaatctctgcagtatcgacggttctagaggatgttcaagcagctggtatctctagacaatttacttctatgactaaagctattacaacactatctgatctagtcaccgagggaaaatctaaagttgttcgtaaaaaagttaaaacttgtaagaagtaaatgcgtgcacttttttataaagatggtaaactctttaccgataataattttttaaatcctgtatcagacgataatccagcgtatgaggttttgcaacatgttaaaattcctactcatttaacagatgtagtagtatatgaacaaacgtgggaggaggcgttaactagattaatttttgtgggaagtgattcaaaaggacgtagacaatacttttacggaaaaatgcatgtacagaatcgcaacgctaaaagagatcgtatttttgttagagtatataacgttatgaaacgaattaattgttttataaacaaaaatataaagaaatcgtccacagattccaattatcagttggcggtttttatgttaatggaaactatgttttttattagatttggtaaaatgaaatatcttaaggagaatgaaacagtagggttattaacactaaaaaataaacacatagaaataagtcccgatgaaatagttatcaagtttgtaggaaaggacaaagtttcacatgaatttgttgttcataagtctaatagactatataaaccgctattgaaactgacggatgattctagtcccgaagaatttctgttcaacaaactaagtgaacgaaaggtatacgaatgtatcaaacagtttggtattagaatcaaggatctccgaacgtatggagtcaattatacgtttttatataatttttggacaaatgtaaagtccatatctcctcttccgtcaccaaaaaagttaatagcattaactatcaaacaaactgctgaagtggtaggtcatactccatcaatttcaaaaagagcttatatggcaacgactattttagaaatggtaaaggataaaaattttttagatgtagtatctaaaactacgttcgatgaattcctatctatagtcgtagatcacgttaaatcatctacggatggatgatatagatctttacacaaataattacaagaccgataaatggaaatggataagcgtatgaaatctctcgcaatgacagctttcttcggagagctaagcacattagatattatggcattgataatgtctatatttaaacgccatccaaacaataccattttttcagtggataaggatggtcagtttatgattgatttcgaatacgataattataaggcttctcaatatttggatctgaccctcactccgatatctggagatgaatgcaagactcacgcatcgagtatagccgaacaattggcgtgtgcggatattattaaagaggatattagcgaatatatcaaaactactccccgtcttaaacgatttataaaaaaataccgcaatagatcagatactcgtatcagtcgagatacagaaaagcttaaaatagctctagctaaaggcatagattacgaatatataaaagacgcttgttaataagtaaatgaaaaaaaactagtcgtttataataaaacacgatatggatgccaacgtagtatcattttctactattgcgacgtatatagacgctttagcgaagaatgcttcggaattagaacagaggtctaccgcatacgaaataaataatgaattggaactagtatttattaagccgccattgattactttgacaaatgtagtgaatatctctacgattcaggaatcgtttattcgatttaccgttactaataaggaaggtgttaaaattagaactaagattccattatctaaggtacatggtctagatgtaaaaaatgtacagttagtagatgctatagataacatagtttgggaaaagaaatcattagtgacggaaaatcgtcttcacaaagaatgcttgttgagactatcgacagaggaacgtcatatatttttggattacaagaaatatggatcctctatccgactagaattagtcaatcttattcaagcaaaaacaaaaaactttacgatagactttaagctaaaatattttctaggatccggtgcccagtctaaaagttctttgttgcacgctattaatcatccaaagtcaaggcctaatacatctctggaaatagaattcacacctagagacaatgaaacagttccatatgatgaactaataaaggaattgacgactctctcgcgtcatatatttatggcttctccagagaatgtaattctttctccgcctattaacgcgcctataaaaacctttatgttgcctaaacaagatatagtaggtttggatctggaaaatctatatgccgtaactaagactgacggcattcctataactatcagagttacatcaaacgggttgtattgttattttacacatcttggttatattattagatatcctgttaagagaataatagattccgaagtagtagtctttggtgaggcagttaaggataagaactggaccgtatatctcattaagctaatagagcctgtgaatgcaatcaatgatagactagaagaaagtaagtatgttgaatctaaactagtggatatttgtgatcggatagtattcaagtcaaagaaatacgaaggtccgtttactacaactagtgaagtcgtcgatatgttatctacatatttaccaaagcaaccagaaggtgttattctgttctattcaaagggacctaaatctaacattgattttaaaattaaaaaggaaaatactatagaccaaactgcaaatgtagtatttaggtacatgtccagtgaaccaattatctttggagaatcgtctatctttgtagagtataagaaatttagcaacgataaaggctttcctaaagaatatggttctggtaagattgtgttatataacggcgttaattatctaaataatatctattgtttggaatatattaatacacataatgaagtgggtattaagtccgtggttgtacctattaagtttatagcagaattcttagttaatggagaaatacttaaacctagaattgataaaaccatgaaatatattaactcagaagattattatggaaatcaacataatatcatagtcgaacatttaagagatcaaagcatcaaaataggagatatctttaacgaggataaactatcggatgtgggacatcaatacgccaataatgataaatttagattaaatccagaagttagttattttacgaataaacgaactagaggaccgttgggaattttatcaaactacgtcaagactcttcttatttctatgtattgttccaaaacatttttagacgattccaacaaacgaaaggtattggcgattgattttggaaacggtgctgacctggaaaaatacttttatggagagattgcgttattggtagcgacggatccggatgctgatgctatagctagaggaaatgaaagatacaacaaattaaactctggaattaaaaccaagtactacaaatttgactacattcaggaaactattcgatccgatacatttgtctctagtgtcagagaagtattctattttggaaagtttaatatcatcgactggcagtttgctatccattattcttttcatccgagacattatgctaccgtcatgaataacttatccgaactaactgcttctggaggcaaggtattaatcactaccatggacggagacaaattatcaaaattaacagataaaaagacttttataattcataagaatttacctagtagcgaaaactatatgtctgtagaaaaaatagctgatgatagaatagtggtatataatccatcaacaatgtctactccaatgactgaatacattatcaaaaagaacgatatagtcagagtgtttaacgaatacggatttgttcttgtagataacgttgatttcgctacaattatagaacgaagtaaaaagtttattaatggcgcatctacaatggaagatagaccgtctacaaaaaactttttcgaactaaatagaggagccattaaatgtgaaggtttagatgtcgaagacttacttagttactatgttgtttatgtcttttctaagcggtaaataataatatggtatgggttctgatctcccagttctaaatgcattaaataattccaatagagcgatttttgttcctataggaccttccaactgtggatactctgtattgttaatagatatattaatacttttgtcgggtaacagaggttctacgtcttctaaaaataaaagttttataacatctggcctgttcataaataaaaacttggcgattctatatatactcttattatcaaatctagccattgtcttatagatgtgagctactgtaggtgtaccatttgattttctttctaatactatatatttctctcgaagaagttcttgcacatcatctgggaataaaatactactgttgagtaaatcagttattttttttatatcgatattgatggacatttttatagttaaggataataagtatcccaaagtcgataacgacgataacgaagtatttatacttttaggaaatcacaatgactttatcagattaaaattaacaaaattaaaggagcatgtatttttttctgaatatattgtgactccagatacatatggatctttatgcgtcgaattaaatgggtctagttttcagcacggcggtagatatatagaggtggaggaatttatagatgctggaagacaagttagatggtgttctacatccaatcatatatctaaagatatacccgaagatatgcacactgataaatttgtcatttatgatatttatacgtttgattcgttcaagaataaacgattggtattcgtacaggtacctccgtcgttaggagatgatagtcatttgactaatccgttattgtcaccgtattatcgtaattcagtagccagacaaatggtcaatgatatgatttttaatcaagattcatttttaaaatatttattagaacatctgattagaagccactatagagtttctaaacatataacaatagttagatacaaggataccgaagaattaaatctaacgagaatatgttataatagagataagtttaaggcgtttgtattcgcttggtttaacggcgtttcggaaaatgaaaaggtactagatacgtataaaaaggtatctaatttgatataatgaattcagtgactgtatcacacgcgccatatactattacttatcacgatgattgggaaccagtaatgagtcaattggtagagttttataacgaagtagccagttggctgctacgagacgagacgtcgcctattcctgataagttctttatacagttgaaacaaccgcttagaaataaacgagtatgtgtgtgtggtatagatccgtatccgaaagatggaactggtgtaccgttcgaatcaccaaattttacaaaaaaatcaattaaggagatagcttcatctatatctagattaaccggagtaattgattataaaggttataaccttaatataatagacggggttataccctggaattattacttaagttgtaaattaggagaaacaaaaagtcacgcgatttactgggataagatttccaagttactgctgcagcatataactaaacacgttagtgttctttattgtttgggtaaaacagatttctcgaatatacgggccaagttagaatccccggtaactaccatagtcggatatcatccagcggctagagaccgccaattcgagaaagatagatcatttgaaattatcaacgttttactggaattagacaacaaggcacctataaattgggctcaagggtttatttattaatgctttagtgaaattttaacttgtgttctaaatggatgcggctattagaggtaatgatgttatctttgttcttaagactataggtgtcccgtcagcgtgcagacaaaatgaagatccaagatttgtagaagcatttaaatgcgacgagttagaaagatatattgagaataatccagaatgtacactattcgaaagtcttagggatgaggaagcatactctatagtcagaattttcatggatgtagatttagacgcgtgtctagacgaaatagattatttaacggccattcaagattttattatcgaggtgtcaaactgtgtagctagattcgcgtttacagaatgcggcgccattcatgaaaatgtaataaaatccatgagatctaatttttcattgactaagtctacaaatagagataaaacaagttttcatattatctttttagatacgtataccactatggatacattgatagctatgaaacgaacactattagaattaagtagatcatctgaaaatccactaaccagatcgatagacactgccgtatataggagaaaaacaactcttcgggttgtaggtactaggaaaaatccaaattgcgacactattcatgtaatgcaaccaccgcatgataatatagaagattacctattcacttacgtggatatgaacaacaatagttattacttttctctacaacaacgattggaggatttagttcctgataagttatgggaaccagggtttatttcattcgaagacgctataaaaagagtttcaaaaatattcattaattctataataaactttaatgatctcgatgaaaataattttacaacggtaccactggtcatagattacgtaacaccttgtgcattatgtaaaaaacgatcgcataaacatccgcatcaactatcgttggaaaatggtgctattagaatttacaaaactggtaatccacatagttgtaaagttaaaattgttccgttggatggtaataaactgtttaatattgcacaaagaattttagacactaactctgttttattaaccgaacgaggagaccatatagtttggattaataattcatggaaatttaacagcgaagaacccttgataacaaaactaattttgtcaataagacatcaactacctaaggaatattcaagcgaattactctgtccaagaaaacgaaagactgtagaagctaacatacgagacatgttagtagattcagtggagaccgatacctatccggataaacttccgtttaaaaatggtgtattggacctggtagacggaatgttttactctggagatgatgctaaaaaatatacgtgtactgtatcaaccggatttaaatttgacgatacaaagttcgtcgaagacagtccagaaatggaagagttaatgaatatcattaacgatatccaaccattaacggatgaaaataagaaaaatagagagctatatgaaaaaacattatctagttgtttatgcggtgctaccaaaggatgtttaacattcttttttggagaaactgcaactggaaagtcgacaaccaaacgtttgttaaagtctgctatcggtgacctgtttgttgagacgggtcaaacaattttaacagatgtattggataaaggacctaatccatttatcgctaacatgcatttgaaaagatctgtattctgtagcgaactacctgattttgcctgtagtggatcaaagaaaattagatctgacaatattaaaaagttgacagaaccttgtgtcattggaagaccgtgtttctccaataaaattaataatagaaaccatgcgacaatcattatcgatactaattacaaacctgtttttgataggatagataacgcattaatgagaagaattgccgtcgtgcgattcagaacacacttttctcaaccttctggtagagaggctgctgaaaataatgacgcgtacgataaagtcaaactattagacgaggggttagatggtaaaatacaaaataatatatatagatttgcatttctatacttgttggtgaaatggtacaaaaaatatcatgttcctattatgaaactatatcctacacccgaagagattcctgactttgcattctatctcaaaataggtactctgttggtatctagctctgtaaagcatattccattaatgacggacctctccaaaaagggatatatattgtacgataatgtggtcactcttccgttgactactttccaacagaaaatatccaagtattttaattctagactatttggacacgatatagagagcttcatcaatagacataagaaatttgccaatgttagtgatgaatatctgcaatatatattcatagaggatatttcatctccgtaaatatatgctcatatatttatagaagatatcacatatctaaatgaataccggaatcatagatttatttgataatcatgttgatagtataccaactatattacctcatcagttagctactctagattatctagttagaactatcatagatgagaacagaagcgtgttattgttccatattatgggatcaggtaaaacaataatcgctttgttgttcgccttggtagcttccagatttaaaaaggtttacattctagtgccgaacatcaacatcttaaaaattttcaattataatatgggtgtagctatgaacttgtttaatgacgaattcatagctgagaatatctttattcattccacaacaagtttttattctcttaattataacgataacgtcattaattataacggattatctcgctacaataactctatttttatcgttgatgaggcacataatatctttgggaataatactggagaacttatgaccgtgataaaaaataaaaacaagattccttttttactattgtctggatctcccattactaacacacctaatactctgggtcatattatagatttaatgtccgaagagacgatagattttggtgaaattattagtcgtggtaagaaagtaattcagacacttcttaacgaacgcggtgtgaatgtacttaaggatttgcttaaaggaagaatatcatattacgaaatgcctgataaagatctaccaacgataagatatcacggacgtaagtttctagatactagagtagtatattgtcacatgtctaaacttcaagagagagattatatgattactagacgacagctatgttatcatgaaatgtttgataaaaatatgtataacgtgtcaatggcagtattgggacaacttaatctgatgaataatttagatactttatttcaggaacaggataaggaattgtacccaaatctgaaaataaataatggcgtgttatacggagaagaattggtaacgttaaacattagttccaaatttaaatactttattaatcggatacagacactcaacggaaaacattttatatacttttctaattctacatatggcggattggtaattaaatatatcatgctcagtaatggatattctgaatataatggttctcagggaactaatccacatatgataaacggcaaaccaaaaacatttgctatcgttactagtaaaatgaaatcgtctttagaggatctattagatgtgtataattctcctgaaaacgatgatggtagtcaattgatgtttttgttttcatcaaacattatgtccgaatcctatactctaaaagaggtaaggcatatttggtttatgactatcccagatactttttctcaatacaaccaaattcttggacgatctattagaaaattctcttacgccgatatttctgaaccagttaatgtatatcttttagccgccgtatattccgatttcaatgacgaagtgacgtcattaaacgattacacacaggatgaattaattaatgttttaccatttgacatcaaaaagctgttgtatctaaaatttaagacgaaagaaacgaatagaatatactctattcttcaagagatgtctgaaacgtattctcttccaccacatccatcaattgtaaaagttttattgggagaattggtcagacaatttttttataataattctcgtattaagtataacgataccaagttacttaaaatggttacatcagttataaaaaataaagaagacgctaggaattacatagatgatattgtaaacggtcacttctttgtatcgaataaagtatttgataaatctcttttatacaaatacgaaaacgatattattacagtaccgtttagactttcctacgaaccatttgtttggggagttaactttcgtaaagaatataacgtggtatcttctccataaaactgatgagatatataaagaaataaatgtcgagctttgttaccaatggatacctttccgttacattggaaccacacgagctgacgttagacataaaaactaatattaggaatgccgtatataagacgtatctccatagagaaattagtggtaaaatggccaagaaaatagaaattcgtgaagacgtggaattacctctcggcgaaatagttaataattctgtagttataaacgttccgtgtgtaataacctacgcgtattatcacgttggggatatagtcagaggaacattaaacatcgaagatgaatcaaatgtaactattcaatgtggagatttaatctgtaaactaagtagagattcgggtactgtatcatttagcgattcaaagtactgcttttttcgaaatggtaatgcgtatgacaatggcagcgaagtcactgccgttctaatggaggctcaacaaggtatcgaatctagttttgtttttctcgcgaatatcgtcgactcataaaaaagagaatagcggtaagtataaacacgaatactatggcaataattgcgaatgttttattctcttcgatatatttttgataatatgaaaaacatgtctctctcaaatcggacaaccatctcataaaatagttctcgcgcgctggagaggtagttgccgctcgtataatctctccagaataatatacttgcgtgtcgtcgttcaatttatacggatttctatagttctctgttatataatgcggtttgccctcatgattagacgacgacaatagtgttctaaatttagatagttgatcagaatgaatgtttattggcgttggaaaaattatccatacagcgtctgcagagtggttgatagttgttcctagatatgtaaaataatccaacttactaggcagcaaattgtctagataaaatactgaatcaaacggtgcagacgtattggcggatctaatggaatccaattgattaactatcttttgaaaatatacatttttatgatccaatacttgtaagaatatagaaataatgataagtccatcatcgtgtttttttgcctcttcataagaactatattttttcttattccaatgaacaagattaatctctccagagtatttgtacacatctatcaagtgattggatccataatcgtcttcctttccccaatatatatgtagtgatgataacacatattcattggggagaaaccctccacttatatatcctcctttaaaattaatccttactagttttccagtgttctggatagtggttggtttcgactcattataatgtatgtctaacggcttcaatcgcgcgttagaaattgcttttttagtttctatattaataggagatagttgttgcggcatagtaaaaatgaaatgataactgtttaaaaatagctcttagtatgggaattacaatggatgaggaagtgatatttgaaactcctagagaattaatatctattaaacgaataaaagatattccaagatcaaaagacacgcatgtgtttgctgcgtgtataacaagtgacggatatccgttaataggagctagaagaacttcattcgcgttccaggcgatattatctcaacaaaattcagattctatctttagagtatccactaaactattacggtttatgtactacaatgaactaagagaaatctttagacggttgagaaaaggttctatcaacaatatcgatcctcactttgaagagttaatattattgggtggtaaactagataaaaaggaatctattaaagattgtttaagaagagaattaaaagaggaaagtgatgaacgtataacagtaaaagaatttggaaatgtaattctaaaacttacaacacgggataaattatttaataaagtatatataagttattgcatggcgtgttttattaatcaatcgttggaggatttatcgcatactagtatttacaatgtagaaattagaaagattaaatcattaaatgattgtattaacgacgataaatacgaatatctgtcttatatttataatatgctagttaatagtaaatgaacttttacagatctagtataattagtcagattattaagtataatagacgactagctaagtctattatttgcgaggatgactctcaaattattacactcacggcattcgttaaccaatgcctatggtgtcataaacgagtatccgtgtccgctattttattaactactgataacaaaatattagtatgtaacagacgagatagttttctctattctgaaataattagaactagaaacatgtttagaaagaaacgattatttctgaattattccaattatttgaacaaacaggaaagaagtatactatcgtcatttttttctctagatccagctactactgataatgatagaatagacgctatttatccgggtggcatacccaaaaggggtgagaatgttccagagtgtttatccagggaaattaaagaagaagttaatatagacaattcttttgtattcatagacactcggttttttattcatggcatcatagaagataccattattaataaattttttgaggtaatcttctttgtcggaagaatatctctaacgagtgatcaaatcattgatacatttaaaagtaatcatgaaatcaaggatctaatatttttagatccgaattcaggtaatggactccaatacgaaattgcaaaatatgctctagatactgcaaaacttaaatgttacggccatagaggatgttattatgaatcattaaaaaaattaactgaggatgattgattaaaaaatataaattaatttaccatcgtgtatttttataacgggattgtccggcatatcatgtagatagttaccgtctacatcgtatactcgaccatctacgcctttaaatcctctatttattgacattaatctattagaattggaataccaaatattagtaccctcaattagtttattggtaatattttttttagacgatagatcgatggctcttgaaaccaaggttttccaaccggactcattgtcgatcggtgagaagtctttttcattagcatgaatccattctaatgatgtatgtttaaacactctaaacaattggacaaattcttttgatttgctttgaatgatttcaaataggtcttcgtctacagtaggcataccattagataatctagccattataaagtgcacgtttacatatctacgttctggaggagtaagaacgtgactattgagacgaatggctcttcctactatctgacgaagagacgcctcgttccatgtcatatctaaaatgaagatatcattaattgagaaaaaactaataccctcgcctccactagaagagaatacgcatgttttaatgcattctccgttagtgtttgattcttggttaaactcagccaccgccttgattctagtatcttttgttctagatgagaactctatattagagataccaaagactttgaaatatagtaataagatttctattcctgactgattaacaaatggttcaaagactagacatttaccatgggatgctaatattcccaaacatacatctataaatttgacgcttttctcttttaattcagtaaatagagagatatcagccgcactagcatcccctttcaatagttctccctttttaaaggtatctaatgcggatttagaaaactctctatctcttaatgaatttttaaaatcattatatagtgttgctatctcttgcgcgtattcgcccggatcacgattttgtctttcaggaaagctatcgaacgtaaacgtagtagccatacgtctcagaattctaaatgatgatatacctgtttttatttcagcgagtttagccttttgataaatttcttcttgctttttcgacatattaacgtatcgcattaatactgttttcttagcgaatgatgcagacccttctacgtcatcaaaaatagaaaactcgttattaactatatacgaacatagtcctcctagtttggagactaattctttttcatcgactagacgtttattctcaaatagcgattggtgttgtaaggatcctggtcgtagtaagttaaccaacatggtgaattcttgcacactattgacgataggtgtagccgataaacaaatcatcttatggttttttaacgcaatggtcttagataaaaaattatatactgaacgagtaggacggatcttaccatcttctttgattaatgatttagaaatgaagttatgacattcatcaataatgacgcatattctactcttggaattaatagttttgatattagtaaaaaatttatttctaaaattttgatcatcgtaattaataaaaatacaatccttcgttatctctggagcgtatctgagtatagtgttcatccaaggatcttctatcaaagcctttttcaccaataagataatagcccaattcgtataaatatccttaagatgtttgagaatatatacagtagtcattgttttaccgacacccgtttcatggaacaataaaagagaatgcatactgtctaatcctaagaaaactcttgctacaaaatgttgataatccttgaggcgtactacgtccgaccccatcatttcaacgggcatattagtagttctgcgtaaggcataatcgatataggccgcgtgtgatttactcatttatgagtgataagtaataactatgttttaaaaatcacagcagtagtttaactagtcttctctgatgtttgttttcgatactttttgaatcagaagtcatactagaataaagcaacgagtgaacgtaatagagagcttcgtatactctattcgaaaactctaagaacttattaatgaattccgtatccactggattgtttaaaatactaaattgaacactgttcacatccttccaagaagaagacttagtgacggacttaacatgagacataaataaatccaaattttttttacaaacatcactagccaccataatggcgctatctttcaaccagctatcgcttacgcattttagcagtctaacatttttaaagagactacaatatattctcatagtatcgattacacctctaccgaataaagttggaagtttaataatacaatatttttcgtttacaaaatcaaataatggtcgaaacacgtcgaaggttaacatcttataatcgctaatgtatagattgttttcagtgagatgattattagatttaatagcatctcgttcacgtttgaacagtttattgcgtgcgctgaggtcggcaactacggcgtccgctttagtactcctcccataatactttacgctattaatctttaaaatttcatagactttatctagatcgctttctggtaacatgatatcatgtgtaaaaagttttaacatgtcggtcggcattctatttagatcattaactctagaaatctgaagaaagtaattagctccgtattccagactaggtaatgggcttttacctagagacagattaagttctggcaatgtttcataaaatggaagaaggacatgcgttccctcccggatattttttacaatttcatccatttacaactctatagtttgttttcattattattagttattatctcccataatcttggtaatacttaccccttgatcgtaagataccttatacaggtcattacatacaactaccaattgtttttgtacataatagattggatggttgacatccatggtggaataaactactcgaacagatagtttatctttccccctagatacattagccgtaatagttgtcggcctaaagaatatctttggtgtaaagttaaaagttagggttcttgttccattattgctttttgtcagtagttcattataaattctcgagatgggtccgttctctgaatatagaacatcatttccaaatctaacttctagtctagaaataatatcggtcttattcttaaaatctattcccttgatgaagggatcgttaatgaacaaatccttggcctttgattcggctgatctattatctccgttatagacgttacgttgactagtccaaagacttacaggaatagatgtatcgatgatgttgatactatgtgatatgtgagcaaagattgttctcttagtggcatcactatatgttccagtaatggcggaaaactttttagaaatgttatatataaaagaattttttcgtgttccaaacattagcagattagtatgaagataaacactcatattatcaggaacattatcaatttttacatacacatcagcatcttgaatagaaacgataccatcttctggaacctctacgatctcggcagactccggataaccagtcggtgggccatcgctaacaataactagatcatccaacaatctactcacatatgcatctatataatctttttcatcttgtgagtaccctggatacgaaataaatttattatccgtatttccataataaggtttagtataaacagagagagatgttgccgcatgaacttcagttacagtcgccgttggttggtttatttgacctattactctcctaggtttctctataaacgatggtttaatttgtacattcttaaccatatatccaataaagctcaattcaggaacataaacaaattctttgttgaacgtttcaaagtcgaacgaagagtcacgaataacgatatcggatactggattgaaggttaccgttacggtaatttttgaatcggatagtttaagactgctgaatgtatcttccacatcaaacggagttttaatataaacgtatactgtagatggttctttaatagtgtcattaggagttaggccaatagaaatatcattaagttcactagaatatccagagtgtttcaaagcaattgtattattgatacaattattatataattcttcgccctcaatttcccaaataacaccgttacacgaagagatagatacgtgattaatacatttatatccaacatatggtacgtaactgaatcttcccatacctttaacttctggaagttccaaactcagaaccaaatgattaagcgcagtaatatactgatccctaatttcgaagctagcgatagcctgattgtctggaccatcgtttgtcataactccggatagagaaatatattgcggcatatacaaagttggaatttgactatcgactgcgaagacattagaccgtttaatagagtcatccccaccgatcaaagaattaatgatagtattattcattttctatttaaaatggaaaaagcttacaataaactccgtagagaaatatctataatttgtgagttttccttaaagtaacagcttccgtaaacgccgtctttatctcttagtaggtttattgtatttatgaccttttccttatcttcatagaatactaaaggcaacaaagaaatttttggttcttctctaagagctacgtgagacttaaccatagaagccaacgaatccctacatattttagaacagaaataccctacttcaccacccttgtatgtctcaatactaataggtctaaaaaccaaatcttgattacaaaaccaacacttatcaattacactatttgtcttaatagacacatctgccatagatttataatactttggtagtatacaagcgagtgcttcttctttagcgggcttaaagactgctttaggtgctgaaataaccacatctggaaggcttactcgcttagccatttaattacggaactatttttttatacttctaatgagcaagtagaaaacctctcatctacaaaaacgtactcgtgtccataatcctctaccatagttacacgttttttagatctcatatgtgctaaaaagttttcccatactaattggttactattatttttcgtataatttttaacagtttgaggttttagatttttagttacagaagtgatatcgaatattttatccaaaaagaatgaataattaattgtcttagaaggagtgttttcttggcaaaagaataccaagtgcttaaatatttctactacttcattaatcttttctgtactcagattcagtttctcatcttttacttgattgattatttcaaagactaacttataatcctttttatttattctctcgttagccttaagaaaactagatacaaaatttgcatctacatcatccgtggatatttgatttttttccatgatatccaagagttccgagataatttctccagaacattgatgagacaataatctccgcaatacatttctcaaatgaataagtttattagacacgtggaagtttgactttttttgtacctttgtacatttttgaaataccgactcgcaaaaaatacaatattcatatccttgttcagatactataccgttatgtctacaaccgctacataatcgtagattcatgttaacactctacgtatctcgtcgtccaatattttatataaaaacattttatttctagacgttgccagaaaatcctgtaatatttttagttttttgggctgtgaataaagtatcgccctaatattgttaccgtcttccgccaatatagtagttaaattatccgcacatgcagaagaacaccgcttaggcggattcagtacaatgttatatttttcgtaccaactcatttaaatatcataatctaaaatagttctgtaatatgtctagcgctaatatattgatcataatcctgtgcataaattaagatacaacaatgtctcgaaatcatcgacatggcttcttccatagttagaagatcgtcgtcaaagttagcaacgtgattcatcaacatttgctgttttgaggcagcaaatactgaaccgtcgccattcaaccattcataaaaaccatcgtctgaatccattgataatttcttgtactggtttttgagagctcgcatcaatctagcatttctagctcccggattgaaaacagaaagaggatcgtacatccagggtccattttctgtaaatagaatcgtataatgtcccttcaagaagatatcagacgatccacaatcaaagaattggtctccgagtttgtaacaaactgcggactttaacctatacatgataccgtttagcataatttctggtgatacgtcaatcggagtatcatctattagagatctaaagccggtgtaacattctccaccaaacatattcttattctgacgtcgttctacataaaacatcattgctccattaacgataacaggggaatgaacagcactacccatcacattagttcccaatggatcaatgtgtgtaactccagaacatcttccatagcctatgttaggaggagcgaacaccactcttccactattgccatcgaatgccatagaataaatatccttggaattgatagaaatcggactgtcggatgttgtgatcatcttcataggattaacaactatgtatggtgccgcctgaagtttcatatcgtaactgatgccgtttataggtctagccacagaaaccaacgtaggtctaaatccaactatagacaaaatagaagccaatatctgttcctcatctgtcataacttgagagcatccagtatgaataatcttcattagatggggatctaccgcatcatcatcgttacaataaaaaattcccattctaatgttcataattgcttttctaatcatggtatgcatgtttgctctctgaatctctgtggaaattagatctgatacacctgtaatcactatcggattatcctccgtaagacgattaaccaacaacatataattataagactttacttttctaaattcataaagttgctggattaggctataggtgtctccatgtacatacgcgttctcgagcgcaggaagtttaataccgaatagtgccatcagaataggatgaatatagtaattagtttctggttttctataaataaaagacaaatcttgtgaactagacatatcggtaaaatgcatggattggaatcgtgtagtcgacagaagaatatgatgattagatggagagtatattttatctaactctttgagttggtcaccgattctaggactagctcgagaatgaataagtactaaaggatgagtacatttcacagaaacactagcattgttcaatgtgctctttacatgggtaaggagttgaaatagctcgtttctatttgttctgacaatatttagtttattcataatgttaagcatatcctgaatagtaaagttagatgtgtcatacttgttagtagttagatatttagcaattgcattcccatcatttctcaatctcgtactccaatcatgcgtggatgctacttcgtcgatggaaaccatacaatcctttttgataggctgttgagattgatcatttcctgcacgtttaggtttggtacgttgatttctagcccctgcggatataaagtcatcgtctacaatttgggacaatgaattgcatacactacaagacaaagatttatcagaagtgtgaatatgatcttcatctaccaaagaaagagtttgattagtataactagattttagtcctgcgttagatgttaaaaaaacatcgctattgaccacggcttccattatttatattcgtagtttttactcgaaagcgtgattttaatatccaatcttattacttttggaatcgttcaaaacctttgactagttgtagaatttgatctattgccctacgcgtatactcccttgcatcatatacgttcgtcaccagatcgtttgtttcggcctgaagttggtgcatatctctttcaacattcgacatgagatccttaagggccatatcgtctagattttgttgagatgctgctcctggatttggattttgttgtgctgttgtacatactgtaccaccagtaggtgtaggagtacatacagtggccacaataggaggttgagaaagtgtaaccgttggagtagtacaagaaatacttccatccgattgttgtgtacatgtagttgttggtaacgtctgagaaggttgggtagatggcggcgtcgtcgttttttgatctttattaaatttagagataatatcctgaacagcattgctcggcgtcaacgctggaaggagtgaactcgccggcgcatcagtatcttcagacagccaatcaaaaagattagacatatcagatgatgtattagtttgttgtcgtggttttggtgtaggagcagtactactaggtagaagaataggagccgatgtagctgttggaaccggctgtggagttatatgaatagttggttgtagcggttggataggctgtctgctggcggccatcatattatctctagctagttgttctcgcaactgtctttgataatacgactcttgagactttagtcctatttcaatcgcttcatcctttttcgtatccggatccttttcttcagaataatagattgacgactttggtgtagaggattctgccagcctctgtgagaacttgttaaagaagtccatttaaggctttaaaattgaattgcgattataagattaaatggcagacacagacgatattatcgactatgaatccgatgatctcaccgaatacgaggatgatgaagaagaggaagaagatggagagtcactagaaactagtgatatagatcccaaatcttcttataagattgtagaatcagcatccactcatatagaagatgcgcattccaatcttaaacatatagggaatcatatatctgctcttaaacgacgctatactagacgtataagtctatttgaaatagcgggtataatagcagaaagctataacttgcttcaacgaggaagattacctctagtttcagaattttctgacgaaacgatgaagcaaaatatgctacatgtaattatacaagagatagaggagggttcttgtcctatagtcatcgaaaagaacggagaattgttgtcggtaaacgattttgacaaagatggtctaaaattccatctagactatattatcaaaatttggaaacttcaaaaacgatattagaatttatacgaatatcgttctctaaatgtcacaatcaagtctcgcatgttcagcaatttattgtcgtactttatatcgtgttcattaacgatatcttgcaaaatagtaatgattctatcttccttcgatagatattcttcagagattattgtcttatattctttcttgttatcagatatgaatttgataagactttgaacattattgatacccgtctgtttaattttttctacagatattttagttttggcagattctatcgtatctgtcaatagacatccaacatcgacattcgacgtcaattgtctataaatcaacgtataaattttagaaataacattagcgaattgttgtgcgttgatgtcgttattctgaaacagtatgattttaggtagcattttcttaacaaagagaacgtatttattgttactcagttgaacagatgatatatccagattactaacgcatctgattccgtataccaaactttcagaagaaatggtatacaattgtttgtattcattcaatgtctctttttcagaaattagtttagagtcgaatactgcaataattttcaagagatagttttcatcagataagattttatttagtgtagatatgataaaactattgttttgttggagaacttgatacgccgcgttctctgtagtcgacgctctcaaatgggaaacaatctccattatttttttggaatcggatactatatcttcggtatcttgacgcagtctagtatacatagagttaagagagattagagtttgtacattaagcaacatgtctctaaatgtggctacaaacttttcctttttcacatcatctagtttattatataccgatttcacaacggcaccagatttaaggaaccagaatgaaaaactctgataactacaatatttcatcatagttacgattttatcatcttctatagttggtgtaatagcgcatacctttttctccaagactggaaccaacgtcataaaaatgtttaaatcaaaatccatatcaacatctgatgcgctaagaccagtctcgcgttcaagattatctttactaatggtgacgaactcatcgtataaaactctaagtttgtccattatttatttacagatttagttgtttaatttatttgtgctcttccagagttgggatagtatttttctaacgtcggtattatattattaggatctacgttcatatgtatcataatattaatcatccacgttttgataaatctatctttagcttctgaaataacgtatttaaacaaaggagaaaaatatttagctacggcatcagacgcaataacattttttgtaaatgtaacgtatttagacgacagatcttcgttaaaaagttttccatctatgtagaatccatcggttgttaacaccattcccgcgtcagattgaataggagtttgaatagtttgttttggaaatagatccttcaataacttatagttgggtgggaaaaaatcgattttatcactagactctttcttttttactatcattacctcatgaactatttcttgaatgagtatatgtattttctttcctatatcggacgcgttcattggaaaatataccatgtcgttaactataagaatatttttatcctcgtttacaaactgaataatatcagatgtagttcgtaaacgaactatatcatcaccagcacaacatctaactatatgatatccactagtttcctttagccgtttattatcttgttccatattagcagtcattccatcatttaagaaggcgtcaaaaataatagggagaaatgacattttggattctgttacaactttaccaaaattaaggatatacggacttactatctttttctcaacgtcaatttgatgaacacacgatgaaaatgtgcttctatgagattgatcatgtagaaaacaacaagggatacaatatttccgcatatcatgaaatatattaagaaatcccaccttattatatttccccaaaggatccatgcacgtaaacattatgccgttatcattaataaagacttctttctcatcggatctgtaaaagttgttactgatttttttcattccaggatctagataattaataatgatgggttttctattcttattctttgtattttggcatatcctagaccagtaaacagtttccactttggtaaaatcagcagacttttgaacgctattaaacatggcattaatggcaataactaaaaatgtaaaatatttttctatgttaggaatatggtttttcactttaatagatatatggtttttggccaaaatgatagatatttttttatccgaggatagtaaaatattattagtcgccgtctctataaaaatgaagctagtctcgatatccaattttattctagaattgataggagtcgccaaatgtaccttatacgttatatctcccttgatgcgttccatttgtgtatctatatcggacacaagatctgtaaatagttttacgttattaatcatcacggtatcgccgtcgctagataacgctaatgtaccatccaagtcccaaatggagagatttaactgttcatcgtttagaataaaatgattaccggtcatattaataaagtgttcatcgtatctagataacaacgacttataattaatgtccaagtcttgaactcgctgaatgatcttttttaacccagttagttttagattggtacgaaatatattgttaaactttgattctacagtaatgtccaaatctagttgtggaaatacttccatcaacattgtttcaaacttgataatattattatctacatcttcgtacgatccaaattccggaatagatgtatcgcacgctctggccacccagataaccaaaaagtcacacgctccaggatatacattgtataaaaagctatcgttttttagtagggtttttttctgcgtgtatacgaagggattaaaaatagtattatcaacgtaactatattccaaattattcttatgagaatagataataatatcgtccttaatatctaacaaatttcctaaatatccctttaattgagtcattcgaagcgtcaatagaatatgtctcttaactatttccggctgttgtatatttaaatgacttcgtaaaaaataatatatgggcgacttctcatctatgtaatcatatggagtgagatatagggctcgttctacctcctgccccttacccacctgtaataccaattgcggacttactatatatcgcatatttatatcgtggggtaaagtgaaaatctactaccgatgatgtaagtcttacaatgttcgaaccagtaccagatcttaatttggaggcctccgtagaactaggggaggtaaatatagatcaaacaacacctatgataaaggagaatagcggttttatatcccgcagtagacgtctattcgcccatagatctaaggatgatgagagaaaactagcactacgattctttttacaaagactttattttttagatcatagagagattcattatttgttcagatgcgttgacgctgtaaaagacgtcactattaccaaaaaaaataacattatcgtggcgccttatatagcacttttaactatcgcatcaaaaggatgcaaacttacagaaacaatgattgaagcattctttccagaactatataatgaacatagtaagaaatttaaattcaactctcaagtatccatcatccaagaaaaactcggataccagtttggaaactatcacgtttatgattttgaaccgtattactctacagtagctctggctattcgagatgaacattcatctggcatttttaatatccgtcaagagagttatctggtaagttcattatctgaaataacatatagattttatctaattaatctaaaatctgatcttgttcaatggagtgctagtacgggcgctgtaattaatcaaatggtaaatactgtattgattacagtgtatgaaaagttacaactggtcatagaaaatgattcacaatttacatgttcattggctgtggaatcaaaacttccaataaaattacttaaagatagaaatgaattatttacaaaattcattaacgagttaaaaaagaccagttcattcaagataagcaaacgcgataaggatacgctactaaaatattttacttaggactggagttagaatttatagacgactcatttcgtttatcattgttactattattactattactatcattattagtgttggcattattagtattcttcttgtcatcttgttcagaaatatacagcaatgctatacctaatactaaatacattatcatgctcgcaatggctctaacaacaacgaaccaaaatgaatttggtcgtagcttttgttcacaaaaatacataaagaaatgtctacataaatctatggcgccattggctacttgaaatagcgccagtcctcctacagattttaatatagctgtataacatgacatttattcatcatcaaaagagacagagtcaccatctgtcatatttagattttttttcatgtgttcaaagtatcctctactcatttcattataatagtttatcatacttagaattttaggacggatcaatgagtaagacttgactagatcgtcagtagtaatttgtgcatcgtctattctgcatccgcttcgtcgaataatgtatagcatcgctttgagattctccatagctatcaagtctttatacaatgacatggaaatatctgtgaatactttatacttctccaacatcgatgccttaacatcatcgcctactttagcattgaaaatacgttctattgtgtagatggatgtagcaagatttttaaacaacaatgccatcttacacgatgattgcctcaagtctccaatcgtttgtttagaacgattagctacagagtccaatgcttggctgactagcatattattatctttagaaattgtattcttcaatgaggcgtttatcatatctgtgatttcgttagtcatattacagtctgactgggttgtaatgttatccaacatatcacctatggatacggtacacgtaccagcatttgtaataatcctatctaagatgttgtatggcattgcgcagaaaatatcttctcctgtaatatctccactctcgataaatctactcagattattcttaaatgccttattctctggagaaaagatatcagtgtccatcatttcattaatagtatacgcagaaaagataccacgagtatcaattctatccaagatacttatcggttccgagtcacagataatggtttcctctccttcgggagatcctgcatagaaatatctaggacaatagtttctatactgtctgtaactctgataatctctaaagtcactaactgataccatgaaattgagaagatcaaacgctgaagtaattaatttttctgcctcgtttttactacaactagttttcatcaatgtagtgacgatgtattgtttagttacttttggtctaatactgatgatagagatattattgcttcccataatggatcttctagtagtcaccttaaagcccattgatgcgaatagcagatagataaagtcttggtatgactcctttctaatatagtacggactacctttgtcacccaactttatacccacataagccataacaacctctttaatagccgtttcatgaggtttatcagccatgagcctgagtagttggaagaatctcatgaatcccgtctcagaaagtcctatatgcatgatagatttatctttcctgggaaactctcgtatagtcatagatgaaatactctttaaagtttctgaaataagattagtaacagtcttacctccgactactctaggtaacaaacaaactctaataggtgttttctctgcggagataatatcagaaaggatagagcaataagtagtattattgtgattataaagaccgaatacataacaggtagaatttataaacatcatgtcctgaaggtttttagacttgtattcctcgtaatccataccgtcccaaaacatggatttggtaactttgatagccgtagatctttgttccttcgccaacaggttaaagaaattaataaagaatttgttgtttctatttatgtccacaaattgcacgtttggaagcgccacggttacattcactgcagcattttgaggatcgcgagtatgaagtacgatgttattgtttactggtatatctggaaagaaatctaccagtctaggaataagagattgatatcgcatagaaatagtaaagtttataatctcatcatcgaagagcattttgttaccattgtaataaatatccactctgtcatatgtataaatgaagtactgttcaaacatgatgagatgtttatatgttggcatagtagtgagatcgacgtttggtaatggcaatgtattaagattaactccataatgtctagcagcatctgcgatgttataagcgtcgtcaaagcggggtcgatcttgtattgttatatattgtctaacacctataagattatcaaaatcttgtctgcttaatacaccgttaacaatttttgccttgaattcttttattggtgcattaataacatccttatagaggatgttaaacaaataagtgttatcaaagttaagatctggatatttcttttctgctagaacatccattgagtcggagccatctggtttaatataaccaccgataaatctagctctgtattctgtatccgtcaatctaatattaagaaggtgttgagtgaaaggtggaagatcgtaaaagctgtgagtattaatgataggattagtttccgaactaatgttaattggggtattaataatatctatatttccagcgttaagtgtaacattaaacagttttaattcacgtgacgtggtatcaattaaataattaatgcccaatttggatatagcagcctgaagctcatcttgtttagttacggatcctaatgagttattaagcaatatatcgaacggatgaacgaaggttgttttaagttggtcacatactttgtaatctagacatagatgcggaagaacggtagaaactatacgaaataaatattcagagtcctctaattgatcaagagtaactattgacttaataggcatcatttatttagtattaaatgacgaccgtaccagtgacggatatacaaaacgatttaattacagagttttcagaagataattatccatctaacaaaaattatgaaataactcttcgtcaaatgtctattctaactcacgttaacaacgtggtagatagagaacataatgccgccgtagtgtcatctccagaggaaatatcctcacaacttaatgaagatctatttccagatgatgattcaccggccactattatcgaacgagtacaacctcatactactattattgacgatactccacctcctacgtttcgtagagagttattaatatcggaacaacgtcaacaacgagaaaaaagatttaatattacagtatcgaaaaatgctgaagcaataatggaatctagatctatgataacttctatgccaacacaaacaccatccttgggagtagtttatgataaagataaaagaattcagatgttagaggatgaagtggttaatcttagaaatcaacgatctaatacaaaatcatctgataatttagataattttaccaaaatactatttggtaagactccgtacaaatcaacagaagttaataagcgtatagccatcgttaattatgcaaatttgaacgggtcccccttatcagtcgaggacttggatgtttgttcggaggatgaaatagatagaatctataaaacgattaaacaatatcacgaaagtagaaaacgaaaaattatcgtcactaacgtgattattattgtcataaacattatcgagcaggcattgctaaaactcggatttgaagaaatcaaaggactgagtaccgatatcacttcagaaattatcgatgtggagatcggagatgactgcgatgctgtagcatctaaactaggaatcggtaacagtccggttcttaatattgtattgtttatactcaagatattcgttaaacgaattaaaattatttaatttaatacattcccatatccagacaacaatcgtctggattaatctgttcctgtcgtctcataccggacgacatattaatctttttattagtgggcatctttttagatggtttctttttcccagcattaactgagtcgatacctagaagatcgtgattgatctctccgaccattccacgaacttctaattggccgtctctgacggtaccataaactattttaccagcattagtaacagcttggacaatctgaccatccatcgcattgtacgatgtagtagtaactgttgttctacgtctaggagcaccagaagtatttttggagcccttggatgttgatgtagaagaagacgaggattttgattttggtttacatgtaatacattttgaactctttgattttgtatcacatgcgccggcagtcacatctgtttgagaattaagattattgttgcctcctttgacggctgcatctccaccgatttgcgctagtagatttttaagctgtggtgtaatcttattaactgtttcgatataatcatcgtaactgcttctaacggctaaattttttttatccgccatttagaagctaaaaatatttttatttatgcagaagatttaactagattatacaatgaactaatatgatccttttccagattatttacaaacttggtattttttggttctggaggaggcgaatttaaattcggacttggattcggattttgtaagttcttgatcttattatacatcgagtataggatggcgacagtaactgctacacaaataccgatcaaaagaagaataccaatcatttattgacaataacttcactattgatcaagtatgcaatatatcatcttttcactaaataagtagtaataatgattcaacaatgtcgagatatatggacgataataatttagttcatggaaatatcgctatgattggtgtgaatgactccgctaactctgtggggtgcgcagtgctttccccacatagaataaattagcattccgactgtgataataataccaagtataaacgccataatactcaatactttccatgtacgagtgggactggtagacttactaaagtcaataaaggcgaagatacacgaaagaatcaaaagaatgattccagcgattagcacgccggaaaaataatttccaatcataagcatcatgtccatttaactaataaaaattttaaatcgccgaatgaacaaagtggaatataaaccatataaaaacaatagtttgtactgcaaaaataatatctatttttgttttcgaagatatggtaaaattaaatagtagtacacagcatgttataactaacagcagcaacggctcgtaattacttatcatttactagacgaaaaggtggtgggatattttcttgctcaaataatacgaatatatcacccatccattttatgcgatgtttatatactctaatctttaatagatctatagacgacgggtttaccaacaatatagattttatcgattcatctaatttaaacccttccttaaacgtgaatgatctattatctggcataacgatgaccctacctgatgaatcggacaatgtactgggccatgtagaataaattatcaacgaattatcgtctacgaacatttatatcatttgttttaattttaggacgcgaataaatggatataaaatagaaaataacagatattacaaccagtgttatggccgcgcccaaccaggtaggcagttttattttatcttttactacaggttctcctggatgtacgtcaccaacggcggacgtagttctagtacaattagacgtaagttccgcttgggaattttttaacgctaaagagttaacgttaatcgtgcacccaacgtatttacatctagttcgttgaacatcttgattataatataaccattttctatctctagattcgtcagtgcactcatgtaaccaacataccctaggtcctaaatatttatctccggaattagattttggataattcgcgcaccaacaatttctatttcctttatgatcgttacaaaagacgtataatgccgtatccccaaaagtaaaataatcaggacgaataattctaataaactcagaacaatatctcgcatccatatgtttggagcaaatatcggaataagtagacatagccggtttccgttttgcacgtaaccattctaaacaattggggtttccaggatcgtttctacaaaatccagtcatgaaatcgtcacaatgttctgtcttgtaattattattaaatatttttggacagtgtttggtatttgtcttagaacaacattttgccacgctatcactatcgcccaggagataatccttttttataaaatgacatcgttgcccggatgctatataatcagtagcgtgttttaaatccttaatatattcaggagttacctcgttctgataatagattaatgatccaggacgaaatttgaaagaactacatggttctccatgaattaatacatattgtttagcaaattcaggaactataaaactactacaatgatctatcgacataccatctatcaaacaaaacttgggtttaatttctcccggagatgtttcataatagtacgtataactttcttctgcaaacttaacagctctattatattcaggataattaaaacctaattccatatatttgtctcgtatatctgctattcctggtgctattttgattctattaagagtaacagctgcccccattcttaataatcgtcagtatttaaactgttaaatgttggtatatcaacatctaccttatttcccgcagtataaggtttgttgcaggtatactgttcaggaatggttacatttatacttcttctatagtcctgtctttcgatgttcatcacatatgcaaagaacagaataaacaaaataatgtaagaaataatattaaatatctgtgaattcgtaaatacattgattgccataataattacagcagctacaatacacacaatagacattcccacagtgttgccattacctccacgatacatttgagttactaagcaataggtaataactaagctagtaagaggcaatagaaaagatgagataaatatcatcaatatagagattagaggagggctatatagagccaagacgaacaaaatcaaaccgagtaacgttctaacatcattatttttgaagattcccaaataatcattcattcctccataatcgttttgcatcatacctccatctttaggcataaacgattgctgctgttcctctgtaaataaatctttatcaagcactccagcacccgcagagaagtcgtcaagcatattgtaatatcttaaataactcatttatatattaaaaaatgtcactattaaagatggagtataatctttatgccgaactaaaaaaaatgacttgtggtcaacccctaagtctttttaacgaagacggggatttcgtagaagttgaaccgggatcatcctttaagtttctgatacctaagggattttacgcctctccttccgtaaagacgagtctagtattcgagacattaacaacgaccgataataaaatcactagtatcaatccaacaaatgcgccaaagttatatcctcttcaacgcaaagtcgtatctgaagtagtttctaatatgaggaaaatgatcgaatcaaaacgtcctctatacatcactcttcacttggcgtgtggatttggtaagactattaccacgtgttatcttatggctacacacggtagaaaaaccgtcatttgcgtacccaataaaatgttaatacatcaatggaagacacaggtagaggcagtcggattggaacataagatatccatagatggagtaagtagtctattaaaggaactaaagactcaaagtccggatgtattaatagtagtcagtagacatctgacaaacgatgccttttgtaaatatatcaataagcattatgatttgttcatcttggatgaatcacatacgtataatctgatgaacaatacagcagttacaagatttttagcgtattatcctccgatgatgtgttattttttaactgctacacctagaccatctaaccgaatttattgtaacagtattattaatattgccaagttatccaatctaaaaaaaactatctatgcagtagatagtttttttgagccatattccacagataatattagacatatggtaaaacgactagatggaccatctaataaatatcatatatataccgagaagttattatctgtagacgagcctagaaatcaacttattcttgataccctggtagaagaattcaagtcaggaactattaatcgcattttagttattactaaactacgtgaacatatggtattattctacaaacgattattagattttttcggaccagaggttgtatttataggagacgcccaaaatagacgtactccagatatggtcaaatcaatcaaggaactaaatagatttatattcgtatccaccttattttattccggtactggtttagatattcctagtttggattcgttgttcatttgctcggcagtaatcaacaatatgcaaatagagcaattactagggagggtatgtcgagaaacagaactattagataggacggtatatgtatttcctaacacatccatcaaagaaataaagtacatgataggaaatttcatgcaacgaattattagtctgtctgtagataaactaggatttaaacaaaaaagttatcggaaacatcaagaatccgatcccacttctgcatgtacaacatcatccagagaagaacgtgtattaaatagaatatttaactcgcaaaatcgttaagaagtttaagcgacgatccgcatgctgcgcaggccagtgtattacccctcatagtattaatataatccaatgatacttttgtgatgtcggaaatcttaaccaatttagactgacaggcagaacacgtcatgcaatcatcatcgtcatcgataactgtagtcttgggcttctttttgcgactcttcattccggaacgcacattggtgctatccatttaggtagtaaaaaataagtcagaatatgccctataacacgatcgtgcaaaacctggtatatcgtctctatctttatcacaatatagtgtatcgacatttttattattattgacctcgtttatcttggaacatggaatgggaacatttttgttatcaacggccatctttgccttaattccagatgttgtaaaattataactaaacagtctatcatcgacacaaatgaaattcttgtttagacgtttgtagtttacgtatgcggctcgttcgcgtctcattttttcagatattgcaggtactataatattaaaaataagaatgaaataacataggattaaaaataaagttatcatgacttctagcgctgatttaactaacttaaaagaattacttagtctgtacaaaagtttgagattttcagattctgcggctatagaaaagtataattctttggtagaatggggaacatctacttactggaaaataggcgtgcaaaaggtagctaatgtcgagacgtcaatatctgattattatgatgaggtaaaaaataaaccgtttaatattgatccgggctattacattttcttaccggtatattttgggagcgtctttatttattcgaagggtaaaaatatggtagaacttggatctggaaactcttttcaaataccagatgatatgcgaagtgcgtgtaacaaagtattagacagcgataacggaatagactttctgagatttgttttgttaaacaatagatggataatggaagatgctatatcaaaatatcagtctccagttaatatatttaaactagctagtgagtacggattaaacatacccaaatatttagaaattgaaatagaggaagacacattatttgacgacgagttatactctattatagaacgctctttcgatgataaatttccaaaaatatccatatcgtatattaagttgggagaacttagacggcaagttgtagactttttcaaattctcattcatgtatattgagtccatcaaggtagatcgtataggagataatatttttattcctagcgttataacaaaatcaggaaaaaagatattagtaaaagatgtagaccatttaatacgatccaaggttagagaacatacatttgtaaaagtaaaaaagaaaaacacattttccattttatacgactatgatggaaacggaacagaaactagaggagaagtaataaaacgaattatagacactataggacgagactattatgttaacggaaagtatttctctaaggttggtagtgcaggcttaaagcaattgactaataaattagatattaatgagtgcgcaactgtcgatgagttagttgatgagattaataaatccggaactgtaaaacgaaaaataaaaaaccaatcagcatttgatttaagcagagaatgtttgggatatccagaagcggattttataacgttagttaataacatgcggttcaaaatagaaaattgtaaggttgtaaatttcaatattgaaaatactaattgtttaaataacccgagtattgaaactatatatggaaactttaaccagttcgtctcaatctttaatgtcgtcaccgatgtcaaaaaaagattattcgagtgaaataatatgcgcctttgatataggtgcaaaaaatcctgccagaactgttttagaagtcaaggataactccgttagggtattggatatatcaaaattagactggagttctgattgggaaaggcgcatagctaaagatttgtcacaatatgaatacactacagttcttctagaacgtcagcctagaaggtcgccgtatgttaaatttatctattttattaaaggctttttatatcatacatcggctgccaaagttatttgcgtctcgcctgtcatgtctggtaattcatatagagatcgaaaaaagagatcggtcgaagcatttcttgattggatggacacattcggattgcgagactccgttccggatagacgcaaattagacgatgtagcggatagtttcaatttggctatgagatacgtattagataaatggaatactaattatacaccttataataggtgtaaatctagaaattacataaaaaaaatgtaataacgttagtaacgccattatggataatctatttacctttctacatgaaatagaagatagatatgccagaactatttttaactttcatctaataagttgcgatgaaataggagatatatatggtcttatgaaagaacgcatttcctcagaggatatgtttgataatatagtgtataataaagatatacatcctgccattaagaaactagtgtattgcgacatccaacttactaaacacattattaatcagaatacgtatccggtatttaacgattcttcacaagtgaaatgttgtcattatttcgacataaactcagataatagcaatattagctctcgtacagtagagatatttgagagggaaaagtcatctcttgtatcatatattaaaactaccaataagaagagaaaggtcaattacggcgaaataaagaaaactgttcatggaggcactaatgcaaattacttttccggtaaaaagtctgacgagtatctgagtactacagttagatccaacattaatcaaccttggatcaaaaccatctctaagaggatgagagttgatatcattaatcactctatagtaacgcgtggaaaaagctctatattacaaactatagaaattatttttactaatagaacatgtgtgaaaatattcaaggattctactatgcacattattctatccaaggacaaggatgaaaaggggtgtatacacatgattgacaaattattctatgtctattataatttatttctgttgttcgaagatatcatccaaaacgagtactttaaagaagtagctaatgttgtaaaccacgtactcacggctacggcattagatgagaaattattcctaattaagaaaatggctgaacacgatgtttatggagttagcaatttcaaaatagggatgtttaacctgacatttattaagtcgttggatcataccgttttcccctctctgttagatgaggatagcaaaataaagttttttaaggggaaaaagctcaatattgtagcattacgatctctggaggattgtataaattacgtgactaaatccgagaatatgatagaaatgatgaaggaaagatcgactattttaaatagcatagatatagaaacggaatcggtagatcgtctaaaagaattgcttctaaaatgaaaaaaaacactaattcagaaatggatcaacgactagggtataagtttttggtgcctgatcctaaagccggagttttttatagaccgttacatttccaatatgtatcgtattctaattttatattgcatcgattgcatgaaatcttgaccgtcaagcggccactcttatcgtttaagaataatacagaacgaattatgatagaaattagcaatgttaaagtgactcctccagattactcacctataatcgcgagtattaaaggtaagagttatgacgcattagccacgttcactgtaaatatctttaaagaggtaatgaccaaagagggtatatccatcactaaaataagtagttatgagggaaaagattctcatttgataaaaattccgctactaataggatacgggaataaaaatccacttgatacagccaagtatcttgttcctaatgtcataggtggagtctttatcaataaacaatctgtcgaaaaagtaggaattaatctagtagaaaagattacaacatggccaaaatttagggttgttaagccaaactcattcactttctcgttttcctccgtatcccctcctaatgtattaccgacaagatatcgccattacaagatatctctggatatatcacaattggaagcgttgaatatatcatcgacaaagacatttataacggtcaatattgttttgctgtctcaatatttatctagagtgagtctagaattcattagacgtagtttatcatacgatatgcctccagaagttgtctatctagtaaacgcgataatagatagtgctaaacgaattactgaatctattactgactttaatattgatacatacattaatgacctggtggaagctgaacacattaaacaaaaatctcagttaacgatcaacgagttcaaatatgaaatgctgcataactttttacctcatatgaactatacacccgatcaactaaagggattttatatgatatctttactaagaaagtttctctactgtatcttccacacttctagatatccagatagagattcgatggtttgtcatcgcatcctaacgtacggcaaatattttgagacgttggcacatgatgaattagagaattacataggcaacatccgaaacgatatcatgaacaatcacaagaacagaggcacttacgcggtaaacattcatgtactaacaactcccggacttaatcacgcgttttctagcttattgagtggaaagttcaaaaagtcagacggtagttatcgaacacatcctcactattcatggatgcagaatatttctattcctaggagtgttggattttatccggatcaagtaaagatttcaaagatgttttctgtcagaaaataccatccaagtcaatatctttacttttgttcatcagacgttccggaaagaggtcctcaggtaggtttagtatctcaattgtctgtcttgagttccattacaaatatactaacgtctgagtatttggatttggaaaagaaaatttgtgagtatatcagatcatattataaagatgatataagttactttgaaacaggatttccaatcactatagaaaatgctctagtcgcatctcttaatccaaatatgatatgtgattttgtaactgactttagacgtagaaaacggatgggattcttcggtaacttggaggtaggtattactttagttagggatcacatgaatgaaattcgcattaatattggagcgggaagattagtcagaccattcttggttgtggataacggagagctcatgatggatgtgtgtccggagttagaaagcagattagacgacatgacattctctgacattcagaaagagtttccgcatgtcatcgaaatggtagatatagaacaatttacttttagtaacgtatgtgaatcggttcaaaaatttagaatgatgtcaaaggatgaaagaaagcaatacgatttatgtgactttcctgccgaatttagagatggatatgtagcatcttcattagtgggaatcaatcacaattctggacccagagctattcttggatgtgctcaagctaaacaagctatctcttgtctgagctcggatatacgaaataaaatagacaatggaattcatttgatgtatccagagaggccaatcgtgattagtaaggctttagaaacttcaaagattgcggctaattgcttcggccaacatgttactatagcattaatgtcgtacaaaggtatcaatcaagaggatggaattatcatcaaaaaacaatttattcagagaggcggtctcgatattgttacagccaagaaacatcaagtagaaattccattggaaaactttaataacaaagaaagagataggtctaacgcctattcaaaattagaaagtaatggattagttagactgaatgctttcttggaatccggagacgctatggcacgaaatatctcatcaagaactcttgaagatgattttgctagagataatcagattagcttcgatgtttccgagaaatataccgatatgtacaaatctcgcgttgaacgagtacaagtagaacttactgacaaagttaaggtacgagtattaaccatgaaagaaagaagacccattctaggagacaaatttaccactagaacgagtcaaaagggaacagtcgcgtatgtcgcggatgaaacggaacttccatacgacgaaaatggtatcacaccagatgtcattattaattctacatccatcttctctagaaaaactatatctatgttgatagaagttattttaacagccgcatattctgctaagccgtacaacaataagggagaaaaccgacctgtctgttttcctagtagtaacgaaacatccatcgatacatatatgcaattcgctaaacaatgttatgagcattcaaatccgaaattgtccgatgaagaattatcggataaaatcttttgtgaaaagattctctatgatcctgaaacggataagccttatgcatccaaagtattttttggaccaatttattacttgcgtctgaggcatttaactcaggacaaggcaaccgttagatgtagaggtaaaaagacgaagctcattagacaggcgaatgagggacgaaaacgtggaggaggtatcaagttcggagaaatggagagagactgtttaatagcgcatggtgcagccaatactattacagaagttttgaaagattcggaagaagattatcaagatgtgtatgtttgtgaaaattgtggagacatagcagcacaaatcaagggtattaatacatgtcttagatgttcaaaacttaatctctctcctctcttaacaaaaattgataccacgcacgtatctaaagtatttcttactcaaatgaacgccagaggcgtaaaagtcaaattagatttcgaacgaaggcctccttcgttttataaaccattagataaagttgatctcaagccgtcttttctggtgtaatattctagtttggtagtagatacatatcaatatcatcaaattcgagatccgaattataaaatgggcgtggattgttaactatagaatcggacgtctgatattcgaaaatctgtggagtttcaggttttggtggaggtgtaactgctacttgggatactgaagtctgatattcagaaagctgtggatgttctggttcggcatccaccgatggtgtcacatcactaatcggttcggtaacgtctgtggatggaggtgctacttctacagaacctgtagcctcagttgtcaacggagatacatttttaatgcgagaaaatgtataatttggtaatggtttcttatgtggatctgaagaagaggtaagatatctactagaaagataccgatcacgttctagttctcttttgtagaacttaactttttctttctccgcatctagttgatattccaacctcttcacgttactacgttcagattccaattcacgttcgcatgggttacctccgcagtttttacgagcgatttcacgttcagccttcatgcgtctctccctctctctatcgagtttatcagagcagtctttctgaaggcgatcgaactccataaatttctccaacgctttgattgtttccatagatttccgaagttcagcttttaggactgtgattctttttctttcgaattcacagctggatgtacaaccgtttccattaccgccatctctaagtttcttttctagatcggcaacatttcatccccatgccttttacattcctcgagtctactgtcgtcgaaatatcgttccagctccttttcgacatcaataactttagcacgttgtctctcaagctctcttttgtagttatctgattccctggcacgtttaagatcttcatgcaattgagtcagctcttaacttcctctcttgcttcttcgtcatagtacgcgcaatcactgtgagatccattgttaccacgtctacactcggcgagctcgcgtttaagagattcaatttcccgtttgtattggtccatgtttccattgctaccaccattagatttacaggctgctagttgtcgttcgagatcagaaatacgggttttcttggaattgatttcgtcgatgtacttggcatcgaaacacttattaagttctttttccaattctacgattttatttctttcgcgagtcaattccctcctgtagtaactatctgttttgtcagattcacgctctctacgtagactttcttgcaagttactaatttgttccctagcacgtccgagtttagttttatatgctgaatagagttctgattcatcctttgagcagatctctagcgatcgtttaagattcctaattctagtctttagcctatttacctcctcagaagatgttccgttaccgttgcgtttacactcgttaagctgtctatcaagatccatgattctatctctaagacgttgcatctctctttccatatcagcattgctttcattattacgtctgcagtcactcaactgtctttcaatatctgagattctatctctaagacgtcgcatctctctctgtttcggcattggtttcattattacgtttacagtcgttcaactgtctttcaagatctgatattctagattggagtctgctaatctctgtagcattttcacggcattcactcagttgtctttcaagatctgaaattttagattggagtctgctaatctctgtaagatttcctcctccgctctcgatgcagtcggtcaacttattctctagttctctaatacgcgaacgcagtgcatcaacttcttgcgtgtcttcctggttgcgtgtacattcatcgagatctctaacgcgtcgtcgttcttcctcaagttctctgcgtactacagaaagcgtgtccctatcttgttgatatttagcaatttctgattctagagtactgattttgcttacgtagttactaatagttgtcttggccttatcaagatcctccttgtatttgtcgcattccttgatatccctacgaagtctggacagttcccattcgacattacgacgtttatcgatttcagctcggagatcgtcatcgcgttgttttagccacatacgactgagttcaagttctcgttgacaagatccatctacttttccattcctaatagtatccagttccttttctagttctgaacgcatttctcgttccctatcaagcgattctctcaattctcggatagtcttcttatcaatttctaataaatctgaaccatcatctgtcccattttgaatatccctgtgttctttgatctcttttgtaagtcggtcgattctttcggttttataaacagaatccctttccaaagtcctaatcttactgagtttatcactaagttctgcattcaattcggtgagttttctcttggcttcttccaactctgttttaaactctccactatttccgcattcttcctcgcatttatctaaccattcaattagtttattaataactagttggtaatcagcgattcctatagccgttcttgtaattgtgggaacataattaggatcttctaatggattgtatggcttgatagcatcatctttatcattattagggggatggacaaccttaattggttggtcctcatctcctccagtagcgtgtggttcttcaataccagtgttagtaataggcttaggcaaatgcttgtcgtacgcgggcacttcctcatccatcaagtatttataatcgggttctacttcagaatattcttttctaagagacgcgacttcgggagttagtagaagaactctgtttctgtatctatcaacgctggaatcaatactcaagttaaggatagcgaatacctcatcgtcatcatccgtatcttctgaaacaccatcatatgacatttcatgaagtctaacgtattgataaatagaatcagatttagtattaaacagatccttaacctttttagtaaacgcatatgtatattttagatctccagatttcataatatgatcacatgccttaaatgtcagtgcttccatgatataatctggaacactaatgggtgacgaaaaagatacagcaccatatgctacgttgataaataaatctgaaccactaagtagataatgattaatgttaagaaagaggaaatattcagtgtataggtatgtcttggcgtcatatcttgtactaaacacgctaaacagtttgttaatgtgatcaatttccaatagattaattagagcagcgggaataccaacaaacatattaccacatccgtattttctatgaatatcacatatcatgttaaaaaatcttgatagaagagcgaatatctcgtctgacttaatgagtcgtagttcagcagcaacataagtcataactgtaaatagaacatactttcctgtagtgttgattctagactccacatcaacaccattattaaaaatagttttatatacatctttaatctgctctccgttaatcgtcgaacgttctagtatacggaaacactttgatttcttatctgtagttaatgacttagtgatatcacgaagaatattacgaattacatttcttgtttttcttgagagacctgattcagaactcaactcatcgttccatagtttttctacctcagtggcgaaatctttggagtgcttggtacatttttcaataaggttcgtgacctccatttattataaaaaatttattcaaaacttaactacaatcgggtaattataagatcgtagatctcccatgtggcggaatactaccatctatcgcatgtggatggacagtaggtaatggccatgggaacagtaatgtttgcatatttatctttcttgctagtattactgcatattgtcccaatgtttcgatgtgatgttctaacctatcaactgccgctgtatcacaacaatagtgtccgatgaaattaagattatgatccaatgtgtttaatatatgattatcaagtcttatacgatccgcgtcttttttgacaggatcaggttcttctacaggaagaagtttcggcctcttatgatattcatgtctgggaaacggtggtctagggtgaggctccggtatcggagtgggttttggattataatcatcatcgtctatgacatcatcttcgacttcgatatttattttgctatcttgatgatgtcctgtatcagttgcattttcagcactcgactgaatattagcgcattcattgtctattattaccatatttctaaacccaaaatgtatgtgttgaacatcagtactatcgttgatgagtcttatagcatgaattcgcttatcgttatcgggtttatcttctgtcaccttagcaattccttttttattaaactctacataatcatatccatttctattgtttgttctaatataaacgagtatagcatcattgctaaatttttcaatagtatcaaaaacagaatatcctaaaccatataatatatattcaggaacactcaaactaaatgtccaggattctcctaaatacgtaaactttaatagtgcgaaatcattcaaaaatctaccacttatagatagatagtacataaatgcgtatagtagtctacctatctctttattatgaaaaccggcattacgatcatatatgtcgtgatatacctgtgatccgtttacgttaaaccataaatacatgggtgatcctataaacatgaatttatttctaattctcagagctatagttaattgaccgtgtaatatttgcttacatgcatacttgatacgcttattaataagatttttatcattgctcgttatttcagaatcgtatatataaggagtaccatcgtgattcttaccagatattatacaaaatactatatataaaatatattgacccacgttagtaatcatataaatgtttaacgttttaaattttgtattcaatgatccattatcatacgctatcatggtcttgtaatattcattctttaaaatataatattgtgttagccattgcattggagctcctaatggagattttctattctcatccattttaggataggctttcataaagtccctaataacttcgtgaataatgtttctatgttttctactgatgcatgtatttgcttcgatttttttatcccatgtttcatctatcatagatttaaacgcagtaatgctcgcaacattaacatcttgaaccgttggtacaattccgttccataaatttataatgttcgccatttatataactcattttttgaatatacttttaattaacaaaagagttaagttactcatatggacgccgtccagtctgaacatcaatctttttagccagagatatcatagccgctcttagagtttcagcgtgattttccaacctaaatagaacttcatcgttgcgtttacaacacttttctatttgttcaaactttgttgttacattagtaatctttttttccaaattagttagccgttgtttgagagtttcctcattgtcgtcttcatcggctttaacaattgcttcgcgtttagcctctggctttttagcagcctttgtagaaaaaaattcagttgctggaattgcaagatcgtcatctccggggaaaagagttccgtccatttaaagtacagattttagaaactgacactctgcgttatttatatttggtacaacacatggattataaatattgatgttaataacatcagaaaatgtaaagtctatacattgttgcatcgtgttaaattttctaatggatctagtattattgggtccaacttctgcctgaaatccaaatatggaagcggatacaaaaccgtttcctggataaaccacacatctccacttttgctttacatcagaaattgtgtcgttgacatcttgaactctcctatctaatgccggtgttccacctatagattttgaatattcgaatgctgcatgagtagcattaaattccttaatattgccataattttcatatattgagtaaccctggataaaaagtaaacacaccgcagccgtcgctaccacaataaaaaaaattgatagagagttcatttataatctattagaagctgacaaaatttttttacacgcatcagacaatgctttaataaatagttcaacatctacttttgtcatatcgaaccgatggtatgattctaacctagaattacatccgaaaaagttgactatgttcatagtcattaagtcattaacaaacaacattccagactctggattataagacgatactgtttcgtcacaattacctaccttaatcatgtgattatgaatattggctattagagcaccttctaagaaatctataatatctttgaaacacgatttaaaatcaaaccacgaatatacttctacgaagaaagttagtttacccataggagaaataactataaatggagatctaaatacaaaatccggatctatgatagttttaacattattatattctctattaaatacctccacatctaaaaatgttaattttgaaactatgtcttcgtttattaccgtacctgaactaaacgctataagctctattgtttgagaactctttaaacgatattcttgaaatacatgtaacaaagtttcctttaactcggtcggtttatctaccatagttacagaatttgtatccttatctataatataataatcaaaatcgtataaagttatataattatcgcgttcagattgtgatcttttcaaatagactaaaaaccccatttctctagtaagtatcttatgtatatgtttgtaaaatatcttcatggtgggaatatgctctaccgcagttagccattcctcattgacagcggtagatgtattagacaaaactattccaatgtttaacaagggccattttacgagattattaaatccttgtttgataaatgtagccaatgagggttcgagttcaacgacgattgaattctcttcccgcggatgctgcatgatgaacgacgggatgttgttcgattgatttggaattctttttcgactttttgtttatattaaatattttaaaatttatagcggatagcaattcatgtaccacggataatgtagacgcgtattgcgcatcgatatctttattattagataaatttatcaataaatgtgagaagtttgcctcgttaaggtcttccatttaaatattatataaacatttgtgtttgtatcttattcgtcttttatggaatagttttttactagtaaagctgcaattacacactttgtccgtaaaacataaatataaacaccagcttttatcaatcgttccaaaaagtcgacggcggacatttttaacatggcatctattttaaatacacttaggtttttggaaaaaacatcattttataattgtaacgattcaataactaaagaaaagattaagattaaacataagggaatgtcatttgtattttataagccaaagcattctaccgttgttaaatacttgtctggaggaggtatatatcatgatgatttggttgtattggggaaggtaacaattaataatctaaagatgatgctattttacatggatttatcatatcatggagtgacaagtagtggagcaatttacaaattgggatcgtctatcgatagactttctctaaataggactattgttacaaaagttaataattatgatgatacattttttgacgacgatgattgatcgctattgcacaattttgtttttgtactttctaatatagtgtttaggttctttttcatatgagaatattgatttactaaaatatctatgtttaacttttgttctatgacgtccttatcggcggtatcggtacatatacgtaattcaccttcacaaaatacggagtcttcgataataatagccaatcgattattggatctagctgtctgtatcatattcaacatgtttaatatatcctttcgtttcccctttacaggcatcgatcgtagcatattttccgcgtctgatatggaaatgttaaaactacaaaaatgcgtaatgttagcccgtcctaatattggtacgtgtctataagtttggcatagtagaataatagacgtgtttaaatgccttccaaagtttaagaattctattagagtattgcattttgatagtttatcgcctacatcatcaaaaataagtaaaaagtgtgctgattttttatgattttgtgcgacagcaatacatttttctatgttacttttagttcgtatcagattatattctagagattcctgactactaacgaaattaatatgatttggccaaatgtatccatcataatctgggttataaacgggtgtaaacaagaatatatgtttatattttttaactagtgtagaaaacagagatagtaaatagatagtttttccagatccagatcctcctgttaaaaccattctaaacggcatttttaataaattttctcttgaaaattgtttttcttggaaacaattcataattatatttacagttactaaattaatttgataataaatcaaaatatggaaaactaaggttgttagtagggaggagaacaaagaaggcacatcgtgatataaataacatttattatcatgatgacaccagaaaacgacgaagagcagacatctgtgttctccgctactgtttacggagacaaaattcagggaaagaataaacgcaaacgcgtgattggtctatgtattagaatatctatggttatttcactactatctatgattaccatgtccgcgtttctcatagtgcgcctaaatcaatgcatgtctgctaacgaggctgctattactgacgccgctgttgccgttgctgctgcatcatctactcatagaaaggttgcgtctagcactacacaatatgatcacaaagaaagctgtaatggtttatattaccagggttcttgttatatattacattcagactaccagttattctcggatgctaaagcaaattgcactgcggaatcatcaacactacccaataaatccgatgtcttgactacctggctcattgattatgttgaggatacatggggatctgatggtaatccaattacaaaaactacatccgattatcaagattctgatgtatcacaagaagttagaaagtatttttgtgttaaaacaatgaactaatatttatttttgtacattaataaatgaaatcgcttaatagacaaactgtaagtaggtttaagaagttgtcggtgccggccgctataatgatgatactctcaaccattattagtggcataggaacatttctgcattacaaagaagaactgatgcctagtgcttgcgccaatggatggatacaatacgataaacattgttatttagatactaacattaaaatgtctacagataatgcggtttatcagtgtcgtaaattacgagctagattgcctagacctgatactagacatctgagagtattgtttagtattttttataaagattattgggtaagtttaaaaaagaccaatgataaatggttagatattaataatgataaagatatagatattagtaaattaacaaattttaaacaactaaacagtacgacggatgctgaagcgtgttatatatacaagtctggaaaactggttaaaacagtatgtaaaagtactcaatctgtactatgtgttaaaaaattctacaagtgacaacaaaaaatgaattaataataagtcgttaacgtacgccgccatggacgccgcgtttgttattactccaatgggtgtgttgactataacagatacattgtatgatgatctcgatatctcaatcatggactttataggaccatacattataggtaacataaaaactgtccaaatagatgtacgggatataaaatattccgacatgcaaaaatgctactttagctataagggtaaaatagttcctcaggattctaatgatttggctagattcaacatttatagcatttgtgccgcatacagatcaaaaaataccatcatcatagcatgcgactatgatatcatgttagatatagaagataaacatcagccattttatctattcccatctattgatgtttttaacgctacaatcatagaagcgtataacctgtatacagctggagattatcatctaatcatcaatccttcagataatctgaaaatgaaattgtcgtttaattcttcattctgcatatcagacggcaatggatggatcataattgatgggaaatgcaatagtaattttttatcataaaagttgtaaagtaaataataaaacaataaatattgaactagtagtacgtatattgagcaatcagaaatgatgctggtacctcttatcacggtgaccgtagttgcgggaacaatattagtatgttatatattatatatttgtaggaaaaagatacgtactgtctataatgacaataaaattatcatgacaaaattaaaaaagataaagagttctaattccagcaaatctagtaaatcaactgatagcgaatcagactgggaggatcactgtagtgctatggaacaaaacaatgacgtagataatatttctaggaatgagatattggacgatgatagcttcgctggtagtttaatatgggataacgaatccaatgttatggcgcctagcacagaacacatttacgatagtgttgctggaagcacgctgctaataaataatgatcgtaatgaacagactatttatcagaacactacagtagtaattaatgaaacggagactgttgaagtacttaatgaagataccaaacagaatcctaactattcatccaatcctttcgtaaattataataaaaccagtatttgtagcaagtcaaatccgtttattacagaacttaacaataaatttagtgagaataatccgtttagacgagcacatagcgatgattatcttaataagcaagaacaagatcatgaacacgatgatatagaatcatcggtcgtatcattggtgtgattagtttcctttttataaaattgaagtaatatttagtattattgctgccgtcacgttgtacaaatggagatattccctgtattcggcatttctaaaattagcaattttattgctaataatgactgtagatattatatagatacagaacatcaaaaaattatatctgatgagatcaatagacagatggatgaaacggtacttcttaccaacatcttaagcgtagaagttgtaaatgacaatgagatgtaccatcttattcctcatagattatcgacgattatactctgtattagttctgtcggaggatgtgttatctctatagataatgacatcaatggcaaaaatattctaacctttcccattgatcatgctgtaatcatatccccactgagtaaatgtgtcgtagttagcaagggtcctacaaccatattggttgttaaagcggatatacctagcaaacgattggtaacatcgtttacaaacgacatactatatgtaaacaatctgtcactgattaattatttgccgttgtctgtattcattattagacgagtcaccgactatttggatagacacatatgcgatcagatatttgctaataataagtggtattcccttataaccatcgacgataagcaatatcctattccatcaaactgtataggtatgtcctctgccaagtacataaattctagcatcgagcaagatactttaatccatgtttgtaacctcgagcatccgttcgactcagtatacaaaaaaatgcagtcgtacaattctctacctatcaaggaacaaatattgtacggtagaattgataatataaatatgagcattagtatttctgtggattaatagatttctagtatggggatcattaatcatctctaatctctaaatacctcataaaacgaaaaaaaagctattatcaaatactgtacggaatggattcattctcttctctttttatgaaactctgttgtatatctactgataaaactggaagcaaaaaatctgatagaaagaataagaataagatcaaggattatatggaacacgattattataaaataacaatagttcctggttcctcttccacgtctactagctcgtggtattatacacatgcctagtaatagtctctttgcgttgacggaaagcagactagaaataacaggctaaaatgttcagacaccataatagttcccaacccagataataacagagttccatcaacacattcctttaaactcaatcccaaacccaaaaccgttaaaatgtatccggccaattgatagtagataatgaggtgtacagcgcatgataatttacacagtaaccaaaatgaaaatactttagtaattataagaaatatagacggtaatgtcatcatcaacaatccgataatatgcctgagagtaaacattgacggataaaacaaaaatgctccgcataactctatcatggcaataacacaaccaaatacttgtaagattcctaaattagtagaaaatacaacgaatatcgatgtataagtgatctcgagaaataataagaataaagtaatgcccgtaaagataaacatcaacattgtttggtaatcattaaaccaattagtatgaagttgaactaatttcacagtagattttattccagtgttatcctcgcatgtataagtacctggtaagatatctttatattccataatcaatgagacatcactatctgataacgaatgaagtctagcactagtatgccatttacttaatattgtcgtcttggaagttttattataagttaaaatatcatggttatccaatttccatctaatatactttgtcggattatctatagtacacggaataatgatggtatcattacatgctgtatactctatggtctttgtagttgttataacaaccaacgtatagaggtatatcaacgatattctaactcttgacattttttatttatttaaaatgatacctttgttatttattttattctattttgctaacggtattgaatggcataagtttgaaacgagtgaagaaataatttctacttacttattagacgacgtattatacacgggtgttaatggggcggtatacacattttcaaataataaactaaacaaaactggtttaactaataataattatataacaacatctataaaagtagaggatgcggataaggatacattagtatgcggaaccaataacggaaatcccaaatgttggaaaatagacggttcagacgacccaaaacatagaggtagaggatacgctccttatcaaaatagcaaagtaacgataatcagtcacaacggatgtgtactatctgacataaacatatcaaaagaaggaattaaacgatggagaagatttgacggaccatgtggttatgatttattcacggcggataacgtaattccaaaagatggtttacgaggagcattcgtcgataaagacggtacttatgacaaagtttacattcttttcactgatactatcggctcaaagagaattgtcaaaattccgtatatagcacaaatgtgcctaaacgacgaaggtggtccatcatcattgtctagtcatagatggtcgacgtttctcaaagtcgaattagaatgtgatatcgacggaagaagttatagacaaattattcattctagaactataaaaacagataatgatacgatactatatgtattcttcgatagtccttattccaagtccgcattatgtacctattctatgaataccattaaacaatctttttctacgtcaaaattggaaggatatacaaagcaattgccgtctccagctcctggtatatgtttaccagctggaaaagttgttccacataccacgtttgaagtcatagaacaatataatgtactagatgatattataaagcctttatctaaccaacctatcttcgaaggaccgtctggtgttaaatggttcgatataaaggagaaggaaaatgaacatcgggaatatagaatatacttcataaaagaaaattctatatattcgttcgatacaaaatctaaacaaactcgtagctcgcaagtcgatgcgcgactattttcagtaatggtaactgcgaaaccgttatttatagcagatatagggataggagtaggaatgccacaaatgaaaaaaatacttaaaatgtaatcttaatcgagtacaccacacgacaatgaacaaacataagacagattatgctggttatgcttgctgcgtaatatgcggtctaattgtcggaattatttttacagcgacactattaaaagttgtagaacgtaaattagttcatacaccattaatagataaaacgataaaagatgcatatattagagaagattgtcctactgactggataagctataataataaatgtatccatttatctactgatcgaaaaacctgggaggaaggacgtaatgcatgcaaagctctaaattcaaattcggatctaattaagatagagactccaaacgagttaagttttttaagaagccttagacgaggctattgggtaggagaatccgaaatattaaaccagacaaccccatataattttatagctaagaatgccacgaagaatggaactaaaaaacggaaatatatttgtagcacaacgaatactcccaaactgcattcgtgttacactatataacaattacactacatttttatcataccactacttcggttagatgttttagaaaaaaataaatatcgccgtaccgttcttgtttttataaaaataacaattaacaattatcaaattttttctttaatattttacgtggttgaccattcttggtggtaaaataatctcttagtgttggaatggaatgctgtttaatgtttccacactcatcgtatattttgacgtatgtagtcacatcgtttacgcaatagtcagactgtagttctatcatgcttcctacatcagaaggaggaacagttttaaagtctcttggttttaatctattaccgttagttttcatgaaatcctttgttttatccacttcacattttaaataaatgtccactatacattcttttgttaattttactagatcgtcatgggtcatagaatttataggttccgtagtccatggatccaaactagcaaacttcgcgtatacggtatcgcgattagtgtatacaccaactgtatgaaaattaagaaaacagtttaataaatcaacagaaatatttaatcctccgtttgatacagatgcgccatatttatggatttcggattcacacgttgtttgtctgaggtgttcgtctagtgttgcttctacgtaaacttcgattcccatatattctttattgtcagaatcgcataccgatttatcatcatacactgtttgaaaactaaatggtatacacatcaaaataataaataataacgagtacattctgcaatattgttatcgtaattggaaaaatagtgttcgagtgagttggattatgtgagtattggattgtatattttattttatattttgtaataagaataaaatgctaatgtcaagtttattccaatagatgtcttattaaaaacatatataataaataacaatggctgaatggcataaaattatcgaggatatctcaaaaaataataagttcgaggatgccgccatcgttgattacaagactacaaagaatgttctagctgctattcctaacagaacatttgccaagattaatccgggtgaaattattcctctcatcactaatcgtaatattctaaaacctcttattggtcagaaatattgtattgtatatactaactctctaatggatgagaacacgtatgctatggagttgcttactgggtacgcccctgtatctccgatcgttatagcgagaactcataccgcacttatatttttgatgggtaagccaacaacatccagacgtgacgtgtatagaacgtgtagagatcacgctacccgtgtacgtgcaactggtaattaaaataaaaagtaatattcatatgtagtgtcaattttaaatgatgatgatgaaatggataatatccatattgacgatgtcaataatgccggtattggcatacagttcatcgatttttagatttcattcagaggatgtggaattatgttatgggcatttgtattttgataggatctataatgtagtaaatataaaatataatccgcatattccatatagatataattttattaatcgcacgttaaccgtagatgaactagacgataatgtcttttttacacatggttattttttaaaacacaaatatggttcacttaatcctagtttgattgtctcattatcaggaaacttaaaatataatgatatacaatgctcagtaaatgtatcgtgtctcattaaaaatttggcaacgagtacatctactatattaacatctaaacataagacttattctctacatcggtccacgtgtattactataataggatacgattctattatatggtataaagatataaatgacaagtataatgacatctatgattttactgcaatatgtatgctaatagcgtctacattgatagtgaccatatacgtgtttaaaaaaataaaaatgaactcttaattatgctatgctattagaaatggataaaatcaaaattacggttgattcaaaaattggtaatgttgttaccatatcgtataacttggaaaagataactattgatgtcacacctaaaaagaaaaaagaaaaggatgtattattagcgcaatcagttgctgtcgaagaggcaaaagatgtcaaggtagaagaaaaaaatattatcgatattgaagatgacgatgatatggatgtagaaagcgcgtaatacgatctataaaaataagtatataaatactttttatttactgtactcttactgtgtagtggtgataccctactcgattatttttttaaaaaaaaaatacttattctgattcttctagccatttccgtgttcgtttgaatgccacatcgacgtcaaagataggggagtagttgaaatctagttctgcattgttggtacgcacctcaaatgtagtgttggatatcttcaacgtatagttgttgagtagtgatggttttctaaatagaattctcttcatatcattcttgcacgcgtacatttttagcatccatcttggaatcctagatccttgttctattcccaatggtttcatcaatagaagattaaacatatcgtacgaacacgatggagagtaatcgtagcaaaagtaagcatttcctttaatcttagatcccggatactggatatattttgcagccaacacgtgcatccatgcagcatttcctacatatacccggctatgcaccgcgtcatcatcgactgtacgatacataatgttaccgtgttgcttacattgctcgtaaaagactttcatcaatttgtctccttctccgtaaattccagtgggtcttaggcaacaagtatacaattttgctccattcatgattacggaattattggctttcataaccagttgctcggccatacgtttactttttgcgtatacatgtcctggtgatatatcataaagggtatgctcatggccgatgaatggatcaccgtgtttattgggtcctattgcttccatgctactagtatagatcaaatacttgattcctaggtccacacaagctgccaaaatagtctgtgttccataatagtttactttcatgatttcattatcggtgtattttccaaatacatccactagagcagccgtatgaataatcagatttaccccatctagcgcttctctcaccttatcaaagtcgtttatatcacattgtatatagtttataaccttaactttcgaggttattggttgtggatcttctacaatatctatgactctgatttcttgaacatcatctgcactaattaacagttttactatatacctgcctagaaatccggcaccaccagtaaccgcgtacacggccattgctgccactcataatatcagactacttattctattttactaaataatggctgtttgtataatagaccacgataatatcagaggagttatttactttgaaccagtccatggaaaagataaagttttaggatcagttattggattaaaatccggaacgtatagtttgataattcatcgttacggagatattagtcaaggatgtgattccataggcagtccagaaatatttatcggtaacatctttgtaaacagatatggtgtagcatatgtttatttagatacagatgtaaatatatttacaattattggaaaggcgttatctatttcaaaaaatgatcagagattagcgtgtggagttattggtatttcttacataaatgaaaagataatacattttcttacaattaacgagaatggcgtttgatatatcagttaatgcgtctaaaacaataaatgcattagtttacttttctactcagcaaaataaattagtcatacgtaatgaagttaatgatacacactacactgtcgaatttgatagggacaaagtagttgacacgtttatttcatataatagacataatgacaccatagagataagaggggtgcttccagaggaaactaatattggttgcgcggttagtatgacttacttgtataataagtatagttttaaactgattttagcagaatatataagacacagaaatactatatccggcaatatttattcggcattgatgacactagatgatttggctattaaacagtatggagacattgatctattatttaatgagaaacttaaagtagactccgattcgggactatttgactttgtcaactttgtaaaggatatgatatgttgtgattctagaatagtagtagctctatctagtctagtatctaaacattgggaattgacaaataaaaaatataggtgtatggcattagccgaacatatatctgatagtattccaatatctgagctatctagactacgatacaatctatgtaagtatctacgcggacacactgagagcatagaggataaatttgattattttgaagacgatgattcgtctacatgttctgccgtaaccgacagggaaacggatgtataattttttttatagcgtgaaggatatgataaaaaatataattgttgtatttatcccattccaatcaccttatatgattctgtaacacaataaaggagtcttatagatgtatagaggtcagatactggtttgataaactgtttattccacataagtatgtttgactttatggttagacccgcatactttaacaaatcactgaaaattggagttaggtattgacctctcagaatcagttgccgttctggaacattaaatgtattttttatgatatactccaacgcatttatgtgggcatacaacaagtcattactaatggaatattccaagagttttagttgtctagtatttaacaagagaagagatttcaacagactgtttatgaactcgaatgccgcctcattgtcgcttatattgatgatgtcgaattctcccaatatcatcaccgatgagtagctcatcttgttatcgggatccaagttttctaaagatgtcattaaaccctcgatcatgaatggatttatcatcatcgtttttatgttggacatgagcttagtccgtttgtccacatctatagaagatgatttctgaattatttcatatatctctctctttaactccaggaacttgtcaggatggtctactttaatatgttctcgtctaagagatgaaaatctttggatggttgcacgcgacttttctctaaaggatgacgttgcccaagatcctctcttaaatgaatccatcttatccttggacaagatggacagtctattttccttagatggtttaatatttttgttacccatgatctataaaggtagacctaatcgtctcggatgaccatatatttattttcagttttattatacgcataaattgtaaaaaatatgttaggtttacgaaaatgtctcgtggggcattaatcgtttttgaaggattggacaaatctggaaaaacaacacaatgtatgaacatcatggaatcaataccttcaaacacaataaaataccttaactttcctcagagatccactgtcactggaaagatgatagatgactatctaactcgtaaaaaaacctataatgatcatatagttaatctattattttgtgcaaatagatgggagtttgcatcttttatacaagaacaactagaacagggaattactttaatagttgatagatacgcattttctggagtagcgtatgccgccgctaaaggcgcgtcaatgactctcagtaagagttatgaatctggattgcctaaacccgacttagttatattcttggaatctggtagcaaagaaattaatagaaacgtcggtgaggaaatttatgaagatgttacattccaacaaaaggtattacaagaatataaaaaaatgattgaagaaggagatattcattggcaaattatttcttctgaattcgaggaagatgtaaagaaggagttgattaagaatatagttatagaggctatacacacggttactggaccagtggggcaactgtggatgtaatagtgaaattacattttttataaatagatgttagtacagtgttataaatggatgaagcatattactctggcaacttggaatcagtactcggatacgtgtccgatatgcataccgaactcgcatcaatatctcaattagttattgccaagatagaaactatagataatgatatattaaacaaggacattgtaaattttatcatgtgtagatcaaacttggataatccatttatctctttcctagatactgtatatactattatagatcaagagaactatcagactgagttgattaattcattagacgacaatgaaattatcgattgtatagttaataagtttatgagcttttataaggataacctagaaaatatagtagatgctatcattactctaaaatatataatgaataatccagattttaaaactacgtatgccgaagtactcggttccagaatagccgatatagatattaaacaagtgatacgtaagaatatactacaattgtctaataatatccgcgaacgatatttgtgaaaatattaaaaaaaaatactttttttattaaatgacgtcttttcgtgaatttagaaaattatgctgtgctatatatcacgcatcaggatataaagaaaaatctaaattaattagagactttataacagatagggatgataaatatttgatcattaagctattgcttcccggattagacgatagaatttataacatgaacgataaacaaattataaaattatatagtataatatttaaacaatctcaggaagatatgctacaagatttaggatacggatatataggagacactattaggactttcttcaaagagaacacagaaatccgtccacgagataaaagcattttaactttagaagaagtggatagttttttaactacgttatcatccgtaactaaagaatcgcatcaaataaaattattgactgatgtagcatctgtttgtacatgtaatgatttaaaatgtgtagtcatgcttattgataaagatctaaaaattaaagcgggtcctcggtacgtacttaacgctattagtcctaatgcctatgatgtgtttagaaaatctaataacttgaaagagataatagaaaattcatctaaacaaaatctagactctatatctatttctgttatgactccaattaatcccatgttagcggaatcgtgtgattctgtcaataaggcgtttaaaaaatttccatcaggaatgtttgcggaagtcaaatacgatggtgaaagagtacaagttcataaaaataataacgagtttgccttctttagtagaaacatgaaaccagtactctctcataaagtggattatctcaaagaatacataccgaaagcatttaaaaaagctacgtctatcgtattggattctgaaattgttcttgtagacgaacataatgtaccgctcccgtttggaagtttaggtatacacaaaaagaaagaatataaaaactctaacatgtgtttgttcgtgtttgactgtttgtactttgatggattcgatatgacggacattccattgtacgaacgaagatcttttctcaaagatgttatggttgaaatacccaatagaatagtattctcagagttgacgaatattagtaacgagtctcagttaactgacgtattggatgatgcactaacgagaaaattagaaggattggtcttaaaagatattaatggagtatacgaaccgggaaagagaagatggttaaaaataaagcgagactatttgaacgagggttccatggcagattctgccgatttagtagtactaggtgcctactatggtaaaggagcaaagggtggtatcatggcagtctttctaatgggttgttacgacgatgaatccggtaaatggaagacggttaccaagtgttcaggacacgatgataatacgttaagggagttgcaagaccaattaaagatgattaaaattaacaaggatcccaaaaaaattccagagtggttagtagttaataaaatctatattcccgattttgtagtagaggatccgaaacaatctcagatatgggaaatttcaggagcagagtttacatcttccaagtcccataccgcaaatggaatatccattagatttcctagatttactaggataagagaggataaaacgtggaaagaatctactcatctaaacgatttagtaaacttgactaaatcttaatagttacatacaaactgaaaattaaaataacactatttagttggtggtcgccatggatggtgttattgtatactgtctaaacgcgctagtaaaacatggcgaggaaataaatcatataaaaaatgatttcatgattaaaccatgttgtgaaagagtttgtgaaaaagtcaagaacgttcacattggcggacaatctaaaaacaatacagtgattgcagatttgccatatatggataatgcggtatccgatgtatgcaattcactgtataaaaagaatgtatcaagaatatccagatttgctaatttgataaagatagatgacgatgacaagactcctactggtgtatataattattttaaacctaaagatgccattcctgttatcatatctataggaaaggataaagatgtctgtgaactattaatctcatcagacatatcgtgtgcatgcgtggagttaaattcatatcacgtagccattcttcccatggatgtttccttttttaccaaaggaaatgcatcattgattattctcctgtttgatttctctatcgatgcggcacctctcttaagaagtgtaaccgataataatgttattatatctagacaccagcgtctacatgacgagcttccgagttccaattggttcaagttttacataagtataaagtccgactattgttctatattatatatggttgttgatggatctgtgatgcatgcgatagctgataatagaactcacgcaattattagcaaaaatatattagacaatactacgattaacgatgagtgtagatgctgttattttgaaccacagattaggattcttgatagagatgagatgctcaatggatcatcgtgtgatatgaacagacattgtattatgatgaatttacctgatgtaggcgaatttggatctagtatgttggggaaatatgaacctgacatgattaagattgctctttcggtggctggtaatttaataagaaatcgagactacattcccgggagacgaggatatagctactacgtttacggtatagcctctagataatttttttaagcacgaaataaaaaacataattttaaaccaatctatttcatactattttgtgtgatcaccatggacataaagatagatattagtatttctggtgataaatttacggtgactactaggagggaaaatgaagaaagaaaaaaatatctacctctccaaaaagaaaaaactactgatgttatcaaacctgattatcttgagtacgatgacttgttagatagagatgagatgtttactattctagaggaatattttatgtacagaggtctattaggcctcagaataaaatatggacgactctttaacgaaattaaaaaattcgacaatgatgcggaagaacaattcggtactatagaagaactcaagcagaaacttagattaaattctgaagagggagcagataactttatagattatataaaggtacaaaaacaggatatcgtcaaacttactgtatacgattgcatatctatgataggattgtgtgcatgcgtggtagatgtttggagaaatgagaaactgttttctagatggaaatattgtttacgagcgattaaactgtttattgatgatcacatgcttgataagataaaatctatactgcagaatagactagtatatgtggaaatgtcatagaaagttaaaagttaatgagagcaaaaatatataaggttgtattccatatttgttatttttttctgtaatagttagaaaaatacattcgatggtctatctatcagattattatgtgttataaggtactttttctcataataaactagagtatgagtaagatagtgtttttcaaaacatataaatctaaaattgatggatgagatatacagctattaatttcgaaaatatattttaatctgataactttaaacatggatttttaatggtggtttaacgttttaaaaaaagattttgttattgtagtatatgataatattaaaagatggatataaagaatttgctgactgcatgtactattttttacattactacattggctacggcagatatacctacttcgtcactgccacacgctccggtaaacggggcatgtgacgagggagaatatcttgataagaggcataatcaatgttgtaatcagtgtccacctggagaatttgccaaggttagatgtaatggtaacgataacacaaaatgtgaacgctgcccacctcatacatataccgcaatccccaattactctaatggatgtcatcaatgtagaaaatgcccaacaggatcatttgataaggtaaagtgtaccggaacacagaacagtaaatgttcgtgtcttcctggttggtattgcgctactgattcttcacagactgaagattgtcgagattgtataccaaaaaggagatgtccatgcggatactttggtggaatagatgaacaaggaaatcctatttgtaaatcgtgttgtgttggtgaatattgcgactacctacgtaattatagacttgatccatttcctccatgcaaactatctaaatgtaattaattatgattttgatgataatgttaccatacattatatcgctacttggttagtgtattattcagtatgaagacctattaataattacttatcttttgacgatcttgttataattataatataaaaatacttatggcatagtaactcataattgctgacgcgataaattcgtaataatctgttttgttcaaatttttataaggaatctacaggcataaaaataaaaatataatttataatatactcttacagcgcgccatcatgaataacagcagtgaattgattgctgttattaatggatttagaaatagtggacgattttgtgatattaatatagttattaatgatgaaaggataaacgctcacagactcatcctatctggagcctccgaatatttttccattctgttttccaataattttatcgattctaatgaatacgaagttaatctaagtcatttagattatcaaagtgttaacgatttgatcgattacatttatgggatacctttgagcctaactaacgataacgtgaaatatattctttcaaccgctgattttttacaaattggatctgctattacggagtgtgaaaattacatacttaaaaatctttgttctagaaactgtatcgatttctacatatacgctgataaatataataacaagaaaatagaatcagcgtcgtttaacacaatattacaaaatattttgagactcatcaacgatgaaaactttaaatacttaacagaggaatcaatgataaaaattttaagcgatgatatgttaaatataaaaaatgaggatttcgccccactaattctcattaaatggttagagagtactcaacaaccatgcaccgtcgagttacttaaatgcctcagaatatcattgctttccccacaagttataaaatcactttatagtcatcgactggttagttcaatctacgaatgtataacattcttaaacaatatagcattcttggatgaatcatttcctagataccatagcatcgagttgatatctatcggtataagtaattcgcatgataagatttccataaactgctacaatcataaaaaaaatacatgggaaatgatatcttcacgtagatataggtgtagtttcgcagtggccgtcctggataatattatctatatgatgggtggatatgatcagtccccgtatagaagttcaaaggttatagcgtacaatacatgtacaaattcttggatatatgatataccagagctaaaatatcctcgttctaattgtgggggactggctgatgacgaatacatttattgtataggcggcatacgcgatcaggattcatcgttgacatctagtattgatagatggaagccatcaaaaccatattggcagaagtatgctaaaatgcgcgaaccaaaatgtgatatgggggttgcgatgttaaacggattaatatatgttataggtggaatcgttaaaggtgacacgtgtaccgacgcactagagagtttatcagaagatggatggatgaagcatcaacgtcttccaataaaaatgtccaatatgtcgacgattgttcatgatggcaagatttatatatctggaggttacaacaatagtagtgtagttaatgtaatatcgaatctagtccttagctataattcgatatatgatgaatggaccaaattatcatcattaaacattcctagaattaatcccgctctatggtcagcgcataataaattatatgtaggaggaggaatatctgatgatgttcgaactaatacatctgaaacatacgacaaagaaaaagattgttggacattggataatggtcacgtgttaccacgcaattatataatgtataaatgcgaaccgattaaacataaatatccattggaaaaaacacagtacacgaatgattttctaaagtatttggaaagttttataggtagttgatagaacaaaatacataattttgtaaaaataaatcactttttatactaatatgacacgattaccaatacttttgttactaatatcattagtatacgctacaccttttcctcagacatctaaaaaaataggtgatgatgcaactctatcatgtaatcgaaataatacaaatgactacgttgttatgagtgcttggtataaggagcccaattccattattcttttagctgctaaaagcgacgtcttgtattttgataattataccaaggataaaatatcttacgactctccatacgatgatctagttacaactatcacaattaaatcattgactgctagagatgccggtacttatgtatgtgcattctttatgacatcgcctacaaatgacactgataaagtagattatgaagaatactccacagagttgattgtaaatacagatagtgaatcgactatagacataatactatctggatctacacattcaccggaaactagttctgagaaacctgattatatagataattctaattgctcgtcggtattcgaaatcgcgactccggaaccaattactgataatgtagaagatcatacagacaccgtcacatacactagtgatagcattaatacagtaagtgcatcatctggagaatccacaacagacgagactccggaaccaattactgataaagaagaagatcatacagttacagacactgtctcatacactacagtaagtacatcatctggaattgtcactactaaatcaaccaccgatgatacgtacaatgataatgatacagtaccaccaactactgtaggcggtagtacaacctctattagcaattataaaaccaaggactttgtagaaatatttggtattaccgcattaattatattgtcggccgtggcaatattctgtattacgtattatatatgtaataaacgttcacgtaaatacaaaacagagaacaaagtctagatttttgacttacataaatgtctgggatagtaaaatctatcatattgagcgggccatctggtttaggaaagacagccatagccaaaagactatgggaatatatttggatttgtggtgtcccataccactagatttcctcgtcctatggaacgagaaggtgtcgattaccattacgttaacagagaggccatctggaagggaatagccgccggaaactttctagaacatactgagtttttaggaaatatttacggaacttctaaaactgctgtgaatacagcggctattaataatcgtatttgtgtgatggatctaaacatcgatggcgttagaagtcttaaaaatacgtacctaatgccttactcggtgtatataagacctacctctcttaaaatggttgagaccaagcttcgttgtagaaacactgaagcggatgatgagattcatcgtcgtgtgatgttggcaaaaactgacatggatgaggcaggtgaagccggtctattcgacactattatcattgaagatgatgtgaatttagcatatagtaagttaattcagatactacaggaccgtattagaatgtattttaacactaattagagacttaagacttaaaacttgataattaataatataactcgtttttatatgtgtctatttcaacgtctaatgtattagttaaatattaaaacttaccacgtaaaacttaaaatttaaaatgatatttcattgacagatagatcacacattatgaactttcaaggacttgtgttaactgacaattgcaaaaatcaatgggtcgttggaccattaataggaaaaggtggattcggtagtatttatactactaatgacaataattatgtagtaaaaatagagcccaaagctaacggatcattatttaccgaacaggcattttatactagagtacttaaaccatccgttatcgaagaatggaaaaaatctcacaatataaagcacgtaggtcttatcacgtgcaaggcatttggtctatacaaatccattaatgtggaatatcgattcttggtaattaatagattaggtgcagatctagatgcggtgatcagagccaataataatagactaccaaaaaggtcggtgatgttgatcggaatcgaaatcttaaataccatacaatttatgcacgagcaaggatattctcacggagatattaaagcgagtaatatagtcttagatcaaatagataagaataaattatatctagtggattacggattggtttctaaattcatgtctaatggcgaacatgttccatttataagaaatccaaataaaatggataacggtactctagaatttacacctatagattcgcataaaggatacgttgtatctagacgtggagatctagaaacacttggatattgtatgattagatggttgggaggtatcttaccatggactaagatatctgaaacaaagaattgtgcattagtaagtgccacaaaacagaaatatgttaacaatactgcgactttgttaatgaccagtttgcaatatgcacctagagaattgctgcaatatattaccatggtaaactctttgacatattttgaggaacccaattacgacaagtttcggcacatattaatgcagggtgtatattattaagtgtggtgtttggtcgataaaaattaaaaaataacttaatttattattgatctcgtgtgtacaaccgaaatcatggcgatgttttacgcacacgctctcggtgggtacgacgagaatcttcatgcctttcctggaatatcatcgactgttgccaatgatgtcaggaaatattctgttgtgtcagtttataataacaagtatgacattgtaaaagacaaatatatgtggtgttacagtcaggtgaacaagagatatattggagcactgctgcctatgtttgagtgcaatgaatatctacaaattggaaatccgatccatgatcaagaaggaaatcaaatctctatcatcacatatcgccacaaaaactactatgctctaagcggaatcgggtacgagagtctagacttgtgtttggaaggagtagggattcatcatcacgtacttgaaacaggaaacgctgtatatggaaaagttcaacatgattattctactatcaaagagaaggccaaagaaatgagtgcacttagtccaggacctatcatcgattaccacgtctggataggagattgtatctgtcaagttactgctgtggacgtacatggaaaggaaattatgaaaatgagattcaaaaagggtgcggtgcttccgatcccaaatctggtaaaagttaaacttggggagaatgatacagaaaatctttcttctactatatcggcggcaccatcgaggtaaccacctctctggaagacagcgtgaatcatgtactcatgaaacgtttggaaactatacgccatatgtggtctgttgtatatgatcattttgatattgtgaatggtaaagaatgctgttatgtgcatacgcattcatctaatcaaaatcctataccgagtactgtaaaaacaaatttgtacatgaagactatgggatcatgcattcaaatggattccatggaagctctagagtatcttagcgaactgaaggaatcaggtggatggagtcccagaccagaaatgcaggaatttgaatatccagatggagtggaagacactgaatcaattgagagattggcagaggagttcttcaatagatcagaacttcaggctggtgaatcagtcaaatttggtaattctattaattgttaaacatacatctgtttcagctaagcaactaagaacacgtatacggcagcagcttccttctatactctcatcttttaccaacacaaagggtggatatttgttcattggagttgataataatacacacaaagtatttggattcacggtgggttacgactacctcagactgatagagaatgatatagaaaagcatatcaaaagacttcgtgttgtgcatttctgtgagaagaaagaggacatcaagtacgcgtgtcgattcatcaaggtatataaacctggggatgagactacctcgacatacgtgtgcgctatcaaagtggaaagatgctgttgtgctgtgtttgcagattggccagaatcatggtatatggatactaatggtatcaagaagtattctccagatgaatgggtgtcacatataaaattttaattaatgtaactatagagaacaaataataaggttgtaatatcatatagacaataactaacaattaattagtaactgttatctcttttttaactaaccaactaactatatacctattaatacatcgtaattatagttcttaacatctattaatcattaattcgcttctttaattttttataaactaacattgttaattgaaaagggataacatgttacagaatataaattatatatggatttttttaaaaaggaaatacttgactggagtatatatttatctcttcattatatagcacgcgtgttttccaatttttccacatcccatataatacaggattataatctcgttcgaacatacgagaaagtggataaaacaatagttgattttttatctaggttgccaaatttattccatattttagaatatggggaaaatattctacatatttattctatggatgatgctaatacgaatattataattttttttctagatagagtattaaatattaataagaacgggtcatttatacacaatctcgggttatcatcatccattaatataaaagaatatgtatatcaattagttaataatgatcatccagataataggataagactaatgcttgaaaatggacgtagaacaagacattttttgtcctatatatcagatacagttaatatctatatatgtattttaataaatcatggattttatatagatgccgaagacagttacggttgtacattattacatagatgtatatatcactataagaaatcagaatcagaatcatacaatgaattaattaagatattgttaaataatggatcagatgtagataaaaaagatacgtacggaaacacaccttttatcctattatgtaaacacgatatcaacaacgtggaattgtttgagatatgtttagagaatgctaatatagactctgtagactttaatagatatacacctcttcattatgtctcatgtcgtaataaatatgattttgtaaagttattaatttctaaaggagcaaatgttaatgcgcgtaataaattcggaactactccattttattgtggaattatacacggtatctcgcttataaaactatatttggaatcagacacagagttagaaatagataatgaacatatagttcgtcatttaataatttttgatgctgttgaatctttagattatctattatccagaggagttattgatattaactatcgtactatatacaacgaaacatctatttacgacgctgtcagttataatgcgtataatacgttggtctatctattaaacaaaaatggtgattttgagacgattactactagtggatgtacatgtatttcggaagcagtcgcaaacaacaacaaaataataatggaagtactattgtctaaacgaccatctttgaaaattatgatacagtctatgatagcaattactaaacataaacagcataatgcagatttattgaaaatgtgtataaaatatactgcgtgtatgaccgattatgatactcttatagatgtacagtcgctacagcaatataaatggtatattttaagatgtttcgatgaaatagatatcatgaagagatgttatataaaaaataaaactgtattccaattagttttttgtatcaaagacattaatactttaatgagatacggtaaacatccttctttcgtgaaatgcactagtctcgacgtatacggaagtcgtgtacgtaatatcatagcatctattagatatcgtcagagattaattagtctattatccaagaagctggatcctggagataaatggtcgtgttttcctaacgaaataaaatataaaatattggaaaactttaacgataacgaactatccacatatctaaaaatcttataaacattattaaaatataaaatctaagtaggataaaatcacactacatcattgtttccttttagtgctcgacagtgtatactatttttaacgctcataaataaaaatgaaaacgatttccgttgttacgttgttatgcgtactacctgctgttgtttattcaacatgtactgtacccactatgaataacgctaaattaacgtctaccgaaacatcgtttaatgataaccagaaagttacgtttacatgtgatcagggatatcattctttggatccaaatgctgtctgtgaaacagataaatggaaatacgaaaatccatgcaaaaaaatgtgcacagtttctgattatgtctctgaactatataataaaccgctatacgaagtgaattccaccatgacactaagttgcaacggcgaaacaaaatattttcgttgcgaagaaaaaaatggaaatacttcttggaatgatactgttacgtgtcctaatgcggaatgtcaacctcttcaattagaacacggatcgtgtcaaccagttaaagaaaaatactcatttggggaatatatgactatcaactgtgatgttggatatgaggttattggtgcttcgtacataagttgtacagctaattcttggaatgttattccatcatgtcaacaaaaatgtgatatgccgtctctatctaacggattaatttccggatctacattttctatcggtggcgttatacatcttagttgtaaaagtggttttacactaacggggtctccatcatccacatgtatcgacggtaaatggaatcccatactcccaatatgtgtacgaactaacgaaaaatttgatccagtggatgatggtcccgacgatgagacagatttgagcaaactctcgaaagacgttgtacaatatgaacaagaaatagaatcgttagaagcaacttatcatataatcatagtggcgttgacaattatgggcgtcatatttttaatctccgttatagtattagtttgttcctgtgacaaaaataatgaccaatataagttccataaattgctaccgtaaatataaatccgttaaaataattaataatttaataacaaacaagtatcaaaagattaaagacttatagctagaatcaattgagatgtcttcttcagtggatgttgatatctacgatgccgttagagcatttttactcaggcactattataacaagagatttattgtgtatggaagaagtaacgccatattacataatatatacaggctatttacaagatgcgccgttataccgttcgatgatatagtacgtactatgccaaatgaatcacgtgttaaacaatgggtgatggatacacttaatggtataatgatgaatgaacgcgatgtttctgtaagcgttggcaccggaatactattcatggaaatgtttttcgattacaataaaaatagtatcaacaatcaactaatgtatgatataattaatagcgtatctataattctagctaatgagagatatagaagcgcttttaacgacgatggtatatacatccgtagaaatatgattaacaagttgtacggatacgcatctctaactactattggcacgatcgctggaggtgtttgttattatctgttgatgcatctagttagtttgtataaataattatttcaatatactagttaaaattttaagattttaaatgtataaaaaactaataacgtttttatttgtaataggtgcattagcatcctattcgaataatgagtacactccgtttaataaactgagtgtaaaactctatatagatggagtagataatatagaaaattcatatactgatgataataatgaattggtgttaaattttaaagagtacacaatttctattattacagagtcatgcgacgtcggatttgattccatagatatagatgttataaacgactataaaattattgatatgtataccattgactcgtctactattcaacgcagaggtcacacgtgtagaatatctaccaaattatcatgccattatgataagtacccttatattcacaaatatgatggtgatgagcgacaatattctattactgcagagggaaaatgctataaaggaataaaatatgaaataagtatgatcaacgatgatactctattgagaaaacatactcttaaaattggatctacttatatatttgatcgtcatggacatagtaatacatattattcaaaatatgatttttaaaaatttaaaatatattatcacttcagtgacagtagtcaaataacaaacaacaccatgagatatattataattctcgcagttttgttcattaatagtatacatgctaaaataactagttataagtttgaatccgtcaattttgattccaaaattgaatggactggggatggtctatacaatatatcccttaaaaattatggcatcaagacgtggcaaacaatgtatacaaatgtaccagaaggaacatacgacatatccgcatttccaaagaatgatttcgtatctttctgggttaaatttgaacaaggcgattataaagtggaagagtattgtacgggactatgcgtcgaagtaaaaattggaccaccgactgtaacattgactgaatacgacgaccatatcaatttgtacatcgagcatccgtatgctactagaggtagcaaaaagattcctatttacaaacgcggtgacatgtgtgatatctacttgttgtatacggctaacttcacattcggagattctaaagaaccagtaccatatgatatcgatgactacgattgcacgtctacaggttgcagcatagactttgtcacaacagaaaaagtgtgcgtgacagcacagggagccacagaagggtttctcgaaaaaattactccatggagttcgaaagtatgtctgacacctaaaaagagtgtatatacatgcgcaattagatccaaagaagatgttcccaatttcaaggacaaaatggccagagttatcaagagaaaatttaatacacagtctcaatcttatttaactaaatttctcggtagcacatcaaatgatgttaccacttttcttagcatgcttaacttgactaaatattcataactaatttttattaatgatacaaaaacgaaataaaactgcatattatacactggttaacgcccttataggctctaaccattttcaagatgaggtccctgattatagtccttctgttcccctctatcatctactccatgtctattagacgatgtgagaagactgaagaggaaacatggggattgaaaatagggttgtgtataattgccaaagatttctatcccgaaagaactgattgcagtgttcatctcccaactgcaagtgaaggattgataactgaaggcaatggattcagggatatacgaaacaccgataaattataaaaaaagcaatgtgtccgctgtttccgttaataatactattttcgtaactggcggattattcataaataactctaatagcacgatcgtggttaacaatatggaaaaacttgacatttataaagacaaacaatggtcgattatagaaatgcctatggctagggtatatcacggcattgactcgacatttggaatgttatattttgccggaggtctatccgttaccgaacaatatggtaatttagagaaaaacaacgagatatcttgttacaatcctagaacgaataagtggtttgatatttcatatactatttataagatatccatatcatcattgtgtaaactaaataacgtcttctatgtatttagtaaggacattggatatgtggaaaagtatgatggtgcatggaagttagtacatgatcgtctccccgctataaaggcattatcaacttctccttattgattgaaaatgaaaatataaatagtttttatgtatagcagtattaccctatagttttattgcttactactaacatggatacagatgttacaaatgtagaagatatcataaatgaaatagatagagagaaagaagaaatactaaaaaatgtagaaattgaaaataataaaaacattaacaagaatcatcccaatgaatatattagagaagcactcgttattaataccagtagtaatagtgattccattgataaagaagttatagaatgtatcagtcacgatgtaggaatatagatcatatctactaatttttataatcgatacaaaacataaaaaacaactcgttattacatagcaggcatggaatccttcaagtattgttttgataacgatggcaagaaatggattatcggaaatactttatattctggtaattcaatactctataaggtcagaaaaaatttcactagttcgttctacaattacgtaatgaagatagatcacaaatcacacaagccattgttgtctgaaatacgattctatatatctgtattggatcctttgactatcgacaactggacacgggaacgtggtataaagtatttggctattccagatctgtatggaattggagaaaccgatgattatatgttcttcgttataaagaattcgggaagagtattcgccccaaaggatactgaatcagtcttcgaagcatgcgtcactatgataaacacgttagagtttatacactctcgaggatttacccatggaaaaatagaaccgaggaatatactgattagaaataaacgtctttcactaattgactattctagaactaacaaactatacaagagtggaaactcacatatagattacaacgaggacatgataacttcaggaaatatcaattatatgtgtgtagacaatcatcttggagcaacagtttcaagacgaggagatttagaaatgttgggatattgcatgatagaatggttcggtggcaaacttccatggaaaaacgaaagtagtataaaagtaataaaacaaaaaaaagaatataaaaaatttatagctactttctttgaggactgttttcctgaaggaaatgaacctctggaattagttagatatatagaattagtatacacgttagattattctcaaactcctaattatgacagactacgtaaactgtttatacaagattgaaattatattcttttttttatagagtgtggtagtgttacggatatctaatattaatattagactatctctatcgcgctacacgaccaatatcgattactatggatatcttctatgaaaggagagaatgtatttatttctccagcgtcaatctcgtcagtattgacaatactgtattatggagctaatggatccactgctgaacagctatcaaaatatgtagaaacggaggagaacacggataaggttagcgctcagaatatctcattcaaatccatgaataaagtatatgggcgatattctgccgtgtttaaagattcctttttgagaaaaattggcgataagtttcaaactgttgacttcactgattgtcgcactatagatgcaatcaacaagtgtgtagatatctttactgaggggaaaatcaatccactattggatgaaccattgtctcctagcaattagtgccgtatactttaaagcaaaatggttgacgccattcgaaaaggaatttaccagtgattatcccttttacgtatctccgacggaaatggtagacgtaagtatgatgtctatgtacggcaaggcatttaatcacgcatctgtaaaagaatcattcggcaacttttcaatcatagaactgccatatgttggagatactagtatgatggtcattcttccagacaagattgatggattagaatccatagaacaaaatctaacagatacaaattttaagaaatggtgtgactttatggatgctatgtttatagatgttcacattcccaagtttaaggtaacaggctcgtataatctggtggatactctagtaaagtcaggactgacagaggtgttcggttcaactggagattatagcaatatgtgtaatttagatgtgagtgtcgacgctatgatccacaaaacgtatatagatgtcaatgaagagtatacagaagcagctgcagcaacttctgtactagtggcagactgtgcatcaacaattacaaatgagttctgtgcagatcatccgttcatctatgtgattaggcatgttgatggaaaaattcttttcgttggtagatattgctctccgacaactaattgttaaccattttttttaaaaaaaatagaaaaaacatgtggtattagtgcaggtcgttgttcttccaattgcaattggtaagatgacggccaactttagtacccacgtcttttcaccacagcactgtggatgtgacagactgaccagtattgatgacgtcaaacaatgtttgactgaatatatttattggtcgtcctatgcataccgcaacaggcaatgcgctggacaattgtattccacactcctctcttttagagatgatgcggaattagtgttcatcgacattcgcgagctggtaaaaaatatgccgtgggatgatgtcaaagattgtacagaaatcatccgttgttatataccggatgagcaaaaaaccatcagagagatttcggccatcatcggactttgtgcatatgctgctacttactggggaggtgaagaccatcccactagtaacagtctgaacgcattgtttgtgatgcttgagatgctaaattacgtggattataacatcatattccggcgtatgaattgatgagttgtacatcttgacattttctttcttctcttctccctttcttctcttctcccttcctccctcttctccctttcccagaaacaaacttttttacccactataaaataaaatgagtatactacctattatatttcttcctatatttttttattcttcattcgttcagacttttaacgcgtctgaatgtatcgacaaagggcaatattttgcatcattcatggagttagaaaacgagccagtaatcttaccatgtcctcaaataaatacgctatcatccggatataatatattagatattttatgggaaaaacgaggagcggataatgatagaattataccgatagataatggtagcaatatgctaattctgaacccgacacaatcagactctggtatttatatatgcattaccacgaacgaaacctactgtgacatgatgtcgttaaatttgacaatcgtgtctgtctcagaatcaaatatagatcttatctcgtatccacaaatagtaaatgagagatctactggcgaaatggtatgtcccaatattaatgcatttattgctagtaacgtaaacgcagatattatatggagcggacatcgacgccttagaaataagagacttaaacaacggacacctggaattattaccatagaagatgttagaaaaaatgatgctggttattatacatgtgttttagaatatatatacggtggcaaaacatataacgtaaccagaattgtaaaattagaggtacgggatagaataataccttctactatgcaattaccagatggcattgtaacttcaataggtagtaatttgactattgcatgcagagtatcgttgagacctcccacaacggacaccgacgtcttttggataagtaatggtatgtattacgaagaagatgatggggacggaaacggtagaataagtgtagcaaataaaatctatatgaccgataagagacgtgttattacatcccggttaaacattaatcctgtcaaggaagaagatgctacaacgtttacgtgtatggcgtttactattcctagcatcagcaaaacagttactgttagtataacgtgaatgtatgttgttacatttccatgtcaattgagtttataagaatttttatacattatcttccaacaaacaattgacgaacgtattgctatgattaactcccacgatactatgcatattattaatcattaacttgcagactatacctagtgctattttgacatactcgtgttcttgtgtaattgcggtatctatattattaaagtacgtaaatctagctatagttttattatttaattttagataatataccgtctccttatttttaaaaattgccacatcctttattaaatcatgaatgggaatttctatgtcatcgttagtatattgtgaacaacaagagcagatatctataggaaagggtggaatgcgatacattgatctatgtagttttaaaacacacgcgaactttgaagaatttatataaatcattccatcgatacatccttctatgttgacatgtatatatccaggaattcttttattaatgtcaggaaatgtataaactaaaacattgcccgaaagcggtgcctctatctgcgttatatccgttcttaacttacaaaatgtaaccaatacctttgcatgacttgttttgttcggcaacgttagtttaaacttgacgaatggattaattacaatagcatgatccgcgcatctattaagtttttttactttaacgcccttgtatgtttttacagagactttatctaaatttctagtgcttgtatgtgttataaatataacgggatatagaaccgaatcacctaccttagatacccaattacattttatcagatccagataataaacaaattttgtcgccctaactaattctatattgttatatattttacaattggttatgatatcatgtaataacttggagtctaacgcgcatcgtcgtacgtttatacaattgtgatttagtgtagtatatctacacatgtatttttccgcactatagtattctggactagtgataaaactatcgttatatctgtcttcaatgaactcatcgagatattgctctctgtcatattcatacacctgcataaactttctagacatcttacaatccgtgttattttaggatcatatttacatatttacgggtatatcaaagatgttagattagttaatgggaatcgtctataataatgaatattaaacaattatatgaggacttttaccacaaagcatcataaaaatgagtcgtcgtctgatttatgttttaaatatcaaccgcaaatcaactcataaaatacaagagaatgaaatatatacatattttagtcattgcaatatagaccatacttctacagaacttgattttgtagttaaaaactatgatctaaacagacgacaacctgtaactgggtatactgcactacactgctatttgtataataattactttacaaacgatgtactgaagatattattaaatcatgacgtaaatgtaacgatgaaaaccagtagcggacgtatgcctgtttatatattgcttactagatgttgtaatatttcacatgatgtagtgatagatatgatagacaaagataaaaaccacttattacatagagactattccaacctattactagagtatataaaatctcgttacatgttattgaaggaagaggatatcgatgagaacatagtatccactttattagataagggaatcgatcctaactttaaacaagacggatatacagcgttacattattattatttgtgtctcgcacacgtttataaactaggtgagtgtagaaaaccgataacgataaaaaaggccaagcgaattatttctttgtttatacaacatggagctaatctaaacgcgttagataattgtggtaatacaccattccatttgtatcttagtattgaaatgtgtaataatattcatatgactaaaatgctgttgacttttaatccgaatttcaaaatatgtaataatcatggattaacgcctatactatgttatataacttccgactacatacaacacgatattcttgttatgttaatacatcactatgaaacaaatgttggagaaatgccgatagatgagcgtcgtatgatcgtattcgagtttatcaaaacatattctacacgtccggcagattcgataacttatttgatgaataggtttaaaaatataaatatttatacccgctatgaaggaaagacattattacacgtagcatgtgaatataataatacacaagtaatagattatcttatacgtatcaacggagatataaatgcgttaaccgacaataacaaacacgctacacaactcattatagataacaaagaaaattccccatataccattaattgtttactgtatatacttagatatattgtagataagaatgtgataagatcgttggtggatcaacttccatctctacctatcttcgatataaaatcatttgagaaattcatatcctactgtatacttttagatgacacattttacgataggcacgttaagaatcgcgattctaaaacgtatcgatacgcattttcaaaatacatgtcgtttgataaatacgatggtataataactaaatgtcacgacgaaacaatgttactcaaactgtccactgttctagacactacactatatgcagttttaagatgtcataattcgagaaagttaagaagatacctcaacgagttaaaaaaatataataacgataagtcctttaaaatatattctaatattatgaatgagagataccttaatgtatattataaagatatgtacgtgtcaaaggtatatgataaactatttcctgttttcacagataaaaattgtctactaacattactaccttcagaaattatatacgaaatattatacatgctgacaattaacgatctttataatatatcgtatccacctaccaaagtatagttgtatttttctcatgcgatgtgtgtaaaaaaactgatattatataaatattttagtgccgtataataaagatgacgatgaaaatgatggtacatatatatttcgtatcattattgttattgctattccacagttacgccatagacatcgaaaatgaaatcacagaattcttcaataaaatgagagatactctaccagctaaagactctaaatggttgaatccagcatgtatgttcggaggcacaatgaatgatatagccgctctaggagagccattcagcgcaaagtgtcctcctattgaagacagtcttttatcgcacagatataaagactatgtggttaaatgggagaggctagaaaagaatagacggcgacaggtttctaataaacgtgttaaacatggtgatttatggatagccaactatacatctaaattcagtaaccgtaggtatttgtgcaccgtaactacaaagaatggtgactgtgttcagggtatagttagatctcatattaaaaaacctccttcatgcattccaaaaacatatgaactaggtactcatgataagtatggcatagacttatactgtggaattctttacgcaaaacattataataatataacttggtataaagataataaggaaattaatatcgacgacattaagtattcacaaacgggaaaggaattaattattcataatccagagttagaagatagcggaagatacgactgttacgttcattacgacgacgttagaatcaagaatgatatcgtagtatcaagatgtaaaatacttacggttataccgtcacaagaccacaggtttaaactaatactagatccgaaaatcaacgtaacgataggagaacctgccaatataacatgcactgctgtgtcaacgtcattattgatcgacgatgtactgattgaatgggaaaatccatccggatggcttataggattcgattttgatgtatactctgttttaactagtagaggcggtatcaccgaggcgaccttgtactttgaaaatgttactgaagaatatataggtaatacatataaatgtcgtggacacaactattattttgaaaaaacccttacaactacagtagtattggagtaaatatacaatgcatttttatatacattactgaattattattactgaattattattactgaattattattaattatatcgtatttgtgctatagaatggatgaagatacgcgactatctaggtatttgtatctcaccgatagagaacatataaatgtagactctattaaacagttgtgtaaaatatcagatcctaatgcatgttatagatgtggatgtacggctttacatgagtacttttataattatagatcagtcaacggaaaatacaagtatagatacaacggttactatcaatattattcatctagcgattatgaaaattataatgaatattattatgatagaactggtatgaacagtgagagtgataatatatcaatcaaaacagaatatgaattctatgatgaaacacaagatcaaagtacacaactagtaggttacgacattaaactcaaaaccaatgaggatgattttatggctatgatagatcagtgggtgtccatgattatatagatgaatcaattaataaagtagtatatggaagagagtctcacgtaagatggcgggatatatggcaagaacataatgatggcgtatacagtataggaaaggagtgcatagataatatatacgaagacaaccataccgtagacgaattctacaagatagacagcgtatcagatgtagatgacgcggaacacatatctccgataactaaaaaaccatagaatcagttgatgataatacctacatttctaatcttccgtataccatcaaatacaaaatattcgagcaacaataagtattttttatacctttaaaactgataaataaattttttctagtgatattttggcaagatgagaatcctatttctcatcgctttcatgtatgggtgtgttcactcatatgttaacgcggttgaaaccaaatgtccaaatctagacattgtaacatcttctggagaatttcattgttcaggatgtgtggaacatatgcctgagtttagctatatgtattggttggcaaaggatatgaaatcggacgaggataccaagtttatagaacatctgggtgatggcatcaaagaagatgaaaccgttcgtaccacagatagtggaatcgtcactctacgtaaagtccttcatgtgactgatactaataaatttgataattataggttcacttgtgtcctcgctacgctagatggcatttataaaaagaatgtttgctgaagtagttgtgtgctactatttttatttatgatataatctaatggaattaatttgaattgatatttatccaatactaaagattatattagaatcaaattaatcttttatacgagaaaaaataacgacatacgtcgtcaacaaattaaactttttatttattagttaactagcttatagaacttgctcattgttatgtttctaaaacgggtacggcatataggacaattatccgacgcaccggtttctcttcgtgttctatgccatatattgatgcatgttatgcaaaatatatgagtacacgaatccaataaaccaaagtatctatcgttttgagtaaacaacttcatagcaaattccacattctttttctttacttactctatacacgtcctcgtatttatttagtattttgatgatatccaactcagaaatggttgttgtattattgggtgtatttggagtataggtattattagctatgtaccaatttaccaaccctcttaatattgattgataatcacatcggttatccaattaataactaaattgtagtgtatatatagaccatatatgtttctatttttttgacagttacgtatagtttcagtaagttttgattgttgtattcctgtatctctagataagttagtcatatagtcccttccggcgatacgttttttccaagcccgaaattgattagccaaatgtgtatttatttttgtgatattgatataatatttcggataatgcatactgttagtcttatatcatttggttcatctatgtattgtaatattgttacatgatctatagatgatgtattgattttggcaggatcgaattccatatccgcgactaaacagtgaaaaaaatgtaaatactttttaaattttaaattagtaaaacttttttttattttttatgattccaaaaatactgaatacaaagtcctaaattataaatatggagatcatactaccacaacttattattatgtatacaaggccggtgtaatagatagatatatataattctattacaccggcagacaattaccgaccggtatttgtcgttaccaacataccgtataatatgtaatatacaattccataacccattgacagttgttatacatcaaaattgcaattcttttgattacgatgttataagaatgtagttaattgatgtatgatgttaatgtgtcctctttcctcttataacatcgtaatcaaaaacttttttataatatatacctaataatgtgtcttaatagttctcgtgattcgtcaaacaatcattcttataaaatataataaagcaacgtaaaaacacataaaaataagcgtaactaataagacaatggatatttacgacgataaaggtctacagactattaaactgtttaataatgaatttgattgtataaggaatgacatcagagaattatttaaacatgtaactgattccgatagtatacaacttccgatggaagacaattctgatattatagaaaatatcagaaaaatactatatagacgattaaaaaatgtagaatgtgttgacatcgataacacaataacttttatgaaatacgatccaaatgatgataataagcgtacgtgttctaattgggtacccttaactaataactatatggaatattgtctagtaatatatttggaaacaccgatatgtggaggcaaaataaaattataccaccctacaggaaatataaagtcggataaggatattatgtttgcaaagactctagactttaaatcaacgaaagtgttaactggacgtaaaacaattgccgttctagacatatccgtttcatataatagatcaatgactactattcactacaacgacgacgttgatatagatatacatactgataaaaatggaaaagagttatgttattgttatataacaatagatgatcattacttggttgatgtggaaactataggagttatagtcaatagatctggaaaatgtctgttagtaaataaccatctaggtataggtatcgttaaagataaacgtataagcgatagttttggagatgtatgtatggatacaatatttgacttttctgaagcacgagagttattttcattaactaatgatgataacaggaatatagcatgggacactgataaactagacgatgatacagatatatggactcccgtcacagaagatgattacaaatttctttctagactagtattgtatgcaaaatctcaatcggatactgtatttgactattatgttcttactggtgatacggaaccacccactgtattcattttcaaggtaactagattttactttaatatgccgaaataaaaaatttttgtataatatctagaggtagaggtattgtttagataaatacaaataacatagatacatcgcatacttagcatttttataaatatacataagacatacactttatacatttttgtaaaaatactcataaaaaaatttataaaaattatggcacaaccatatcttgtataggtagtttagttcgtcgagtgaacctataaacagataatagacaacacataataatgcctactaatacaagcataataccgggagatgggatatatgacgttgtagtgtttgggttttctgaacgttgatagtctactaatactacatgctgacatctaatgcctgtataaccatgagagcatctacaatacataccgtcaatatctctagcgtggatacagtcaccgtgtaaacaatatccatctccctctggaccgcataatctgatagctggaatatctgttgtagcgtttgtaatttctggcaatgtcgtttcgatagcgttaccactatcggcgaatgatctgattatcatagcagcgaacaacaacatcagataatttatcaacatttttgatggattctgtgtttatgctgtttctcagtgtgtgtttatgacaagattgggaattttatattattaattcagtaatataaactaataatatattgttaattgtgtaaataatataaaaataacaatacaatattgaatgtgttgctgttaaaaatgtatgtgttaatataatagaataaaataaatgagtatgatcattttagataacgattgattttatcattaccgcttcattcttatattctttgcttacggaacctatatttagaaacatctactaacaattttttatgcttgcattattaatggtatgtaatatgattgattgtgtacgcaataccaatttgttaagtatgaatacggggtacaaacataaattgaaatttaacattatttatttatgatatatatcgttatcgttaggtctataccatggatatctttaaagaactaatcttaaaacaccctgatgaaaatgttttgatttctccagtttccattttatctactttatctattctaaatcatggagcagctggttctacagctgaacaactatcaaaatatatagagaatatgaatgagaatacacccgatgacaataatgatgacatggaggtagatattccgtattgtgcgacactagctaccgcaaataaaatatacggtagcgatagtatcgagttccacgcctccttcctacaaaaaataaaagacgattttcaaactgtaaactttaataatgctaaccaaacaaaggaactaatcaacgaatgggttaagacaatgacaaatggtaaaattaattccttattgactagtccgctatccattaatactcgtatgacagttgttagcgccgtccattttaaagcaatgtggaaatatccattttctaaacatcttacatatacagacaagttttatatttctaagaatatagttaccagcgttgatatgatggtgggtaccgagaataacttgcaatatgtacatattaatgaattattcggaggattctctattatcgatattccatacgagggaaactctagtatggtaattatactaccggacgacatagaaggtatatataacatagaaaaaaatataacagatgaaaaatttaaaaaatggtgtggtatgttatctactaaaagtatagacttgtatatgccaaagtttaaagtggaaatgacagaaccgtataatctggtaccgattttagaaaatttaggacttactaatatattcggatattatgcagattttagcaagatgtgtaatgaaactatcactgtagaaaaatttctacatacgacgtttatagatgttaatgaggagtatacagaagcatcggccgttacaggagtatttacgattaacttttcgatggtatatcgtacgaaggtctacataaaccatccattcatgtacatgattaaagacaccacaggacgtatactttttatagggaaatactgctatccgcaataaatataaacaaatagacttttataaagagtcttcaacgataagtatatcgacatactacttatgctgcgaaagattctgaacgagaacgactatctcaccctcttggatcatatccgcactgctaaatactaaatctccactacactttttatcatcttatgaggaatgattgccttcgtgaaataggaataattagcaccagaatagctatggattattgtggtagagagtgcactattctatgtcgtctactggatgaagatgtgacgtacaaaaaaataaaactagaaattgaaacgtgtcacaacttatcaaaacatatagatagacgaggaaacaatgcgctacattgttacgtctccaataaatgcgatacagacattaagattgttctctcgcggagtcgagagactttgtagaaacaacgaaggattaactccgctaggagtatacagtaagcatagatacgtaaaatctcagattgtgcatctactgatatccagctattcaaattcctctaacgaactcaagtcgaatataaatgatttcgatctgtattcggataatatcgacttacgtctgctaaaatacctaattgtggataaacggatacgtccgtccaagaatacgaattatgcaatcaatggtctcggattggtggatatatacgtaacgacgcctaatccgagaccagaagtattgctatggcttcttaaatcagaatgttacagcaccggttacgtatttcgtacctgtatgtacgacagtgatatgtgtaagaactctcttcattactatatatcgtctcatagagaatctcaatctctatccaaggatgtaattaaatgtttgatcgataacaatgtttccatccatggcagagacgaaggaggatctttacccatccaatactactggtctttctcaaccatagatatagagattgttaaattattattaataaaggatgtggacacgtgtagagtatacgacgtcagccctatattagaggcgtattatctaaacaagcgatttagagtaaccccatataatgtagacatggaaatcgttaatcttcttattgagagacgtcatactcttgtcgacgtaatgcgtagtattacttcgtacgattccagagaatataaccactacatcatcgataacattctaaagagatttagacaacaggatgaatccatcgtacaagccatactgataaactacttacattacggcgatatggtcgttcgatgcatgttagataacggacaacaactatcctctacacgactactttgttaataataatctcgtcgatgtaaacgtcgtaaggtttatcgtggaaaatatggacacgcggctgtaaatcacgtatcgaacaatggccgtctatgtatgtacggtctgatattatcgagatttaataattgcgggtatcactgttatgaaaccatactgatagatgtatttgatatactaagcaagtacatggatgatatagatatgatcgataactctactatattacgcggtcgatgtcaataatatacaatttgcaaagcggttattggaatatggagcgagtatcacgctcgataatcaatacggccatccagaaaagcagttacagaagagaaaacaaaacgaaatcgttgttctacaagatgtctctccctacgacgattactacgtaaaaaagatactagcctactgcctattaagggacgagtcattcgcggaactacatagtaaattctgtttaaacgaggactataaaagtgtatttatgaaaaatatatcattcgataagatagattccatcatcgtgacataagtcgcctcaaagagattcgaatctccgacaccgacctgtatacggtatcacagctatcttaaagccatacattcagacagtcacatttcatttcccatgtacgacgatctcatagaacagtgccatctatcgatggagcgtaaaagtaaactcgtcgacaaagcactcaataaattagagtctaccatcggtcaatctagactatcgtatttgcctccggaaattatgcgcaatatcatctaaacagtatgttgtacggaaagaaccattacaaatattatccatgatagaaagaaaatatctatatgattggagaagtaggaaacaggaacaagacaacgattactacattattaaatcatgaagtccgtattatactcgtatatattgtttctctcatgtataataataaacggaagagatatagcaccgcatgcaccatccgatggaaagtgtaaagacaacgaatacaaacgccataatttgtgtccgggaacatacgcttccagattatgcgatagcaagactaacacacgatgtacgccgtgtggttcgggtaccttcacatctcgcaataatcatttacccgcttgtctaagttgtaacggaagacgcgatcgtgtaacacgactcacaatagaatctgtgaatgctctcccggatattattgtcttctcaaaggatcatccggatgcaaggcatgtgtttcccaaacaaaatgtggaataggatacggagtatccggagacgtcatctgttctccgtgtggtctcggaacatattctcacaccgtctcttccgcagataaatgcgaacccgtacccagaaatacgtttaactatatcgatgtggaaattaacctgtatccagttaacgacacgtcgtgtactcggacgaccactaccggtctcagcgaatccatctcaacgtcggaactaactattactatgaatcataaagactgtaatcccgtatttcgtgatggatacttctccgttcttaataaggtagcgacttcaggtttctttacaggagaaaggtgtgcactctgaatttcgagattaaatgcaataacaaagattcttcctccaaacagttaacgaaagcaaagaatgatactatcatgccgcattcggagacagtaactctagtgggcgacatctatatactatatagtaataccaatactcaagactacgaaactgatacaatctcttatcatgtgggtaatgttctcgatgtcgatagccatatgcccggtagttgcgatatacataaactgatcactaattccaaacccacccactttttatagtaagtttttcacccataaataataaatacaataattaatttctcgtaaaagtagaaaatatattctaatttattgcacggtaaggaagtagaatcataaagaacagtactcaatcaatagcaattatgaaacaatatatcgtcctggcatgcatgtgcctggcggcagctgctatgcctgccagtcttcagcaatcatcctcatcctcctcctcgtgtacggaagaagaaaacaaacatcatatgggaatcgatgttattatcaaagtcacaaagcaagaccaaacaccgaccaatgataagatttgccaatccgtaacggaaattacagagtccgagtcagatccagatcccgaggtggaatcagaagatgattccacatcagtcgaggatgtagatcctcctaccacttattactccatcatcggtggaggtctgagaatgaactttggattcaccaaatgtcctcagattaaatccatctcagaatccgctgatggaaacacagtgaatgctagattgtccagcgtgtccccaggacaaggtaaggactctcccgcgatcactcatgaagaagctcttgctatgatcaaagactgtgaagtgtctatcgacatcagatgtagcgaagaagagaaagacagcgacatcaagacccatccagtactcgggtctaacatctctcataagaaagtgagttacgaagatatcatcggttcaacgatcgtcgatacaaaatgcgtcaagaatctagagtttagcgttcgtatcggagacatgtgcaaggaatcatctgaacttgaggtcaaggatggattcaagtatgtcgacggatcggcatctgaaggtgcaaccgatgatacttcactcatcgattcaacaaaactcaaagcgtgtgtctgaatcgataactctattcatctgaaattggatgagtagggttaatcgaacgattcaggcacaccacgaattaaaaaagtgtaccggacactatattccggtttgcaaaacaaaaatgttcttaactacattcacaaaaagttacctctcgcgacttcttctttttctgtctcaatagtgtgatacgattatgacactattcctattcctattcctatttcctttcagagtatcacaaaaatattaaacctctttctgatggtctcataaaaaaagttttacaaaaatatttttattctctttctctctttgatggtctcataaaaaaagttttacaaaaatatttttattctctttctctctttgatggtctcataaaaaaagttttacaaaaatatttttattctctttctctctttgatggtctcataaaaaaagttttacaaaaatatttttattctctttctctctttgatggtctcataaaaaaagttttacaaaaatatttttattctctttctctctttgatggtctcataaaaaaagttttacaaaaatatttttattctctttctctctttgatggtctcataaaaaaagttttacaaaaatatttttattctctttctctctttgatggtctcataaaaaaagttttacaaaaatatttttattctctttctctctttgatggtctcataaaaaaagttttacaaaaatatttttattctctttctctctttgatggtctcataaaaaaagttttacaaaaatatttttattctctttctctctttgatggtctcataaaaaaagttttacaaaaatatttttattctctttctctctttgatggtctcataaaaaaagttttacaaaaatatttttattctctttctctctttgatggtctcataaaaaagttttacaaaaatatttttattctctttctctctttgatggtctcataaaaaagttttacaaaaatatttttattctctttctctctttgatggtctcataaaaaaagttttacaaaaatatttttattctctttctctctttgatggtctcataa

SEQ ID NO: 3 - DNA, 9140 bp, Vaccinia virus
  TK region in GLV-1h22
atgaacggcggacatattcagttgataatcggccccatgttttcaggtaaaagtacagaattaattagacgagttagacgttatcaaatagctcaatataaatgcgtgactataaaatattctaacgataatagatacggaacgggactatggacgcatgataagaataattttgaagcattggaagcaactaaactatgtgatgtcttggaatcaattacagatttctccgtgataggtatcgatgaaggacagttctttccagacattgttgaattagatcgataaaaattaattaattacccgggtaccaggcctagatctgtcgagatccggctggttctttccgcctcagaaggtactttttttttttttttttttttttttttttttttttttttttttttttttttttttttttttttttttttttttttttttttcagtgtttaagtattttattaaatcagacaaggaatctccacactgttgcacataacagcttttatacaatgataaggacatatcatttgtttacaaagaaagtctaaaatttcaagaacattcaaagagctaacacagtaaaggtcatgcaagttctagaatagtgaatcatgacagaactcattcattttatcctttacctccaaaaggcccatctccttaacgagaagacatctcaagaccaggagcttgtcactagtctgatatttcattcaggaatattgagcctgttagcacgtactggcttgataggaagtaactcaaccctaactgtagaaaagggttttctgaagagactcactgctgcaaaatgcatgccctgtattcatattgtgttatacgatgaacatgccacatgctttcatttaagtacgtgtgcgtaacacccgaaccaggaatctcagctatgaccttttcacttagctacgctaaatgtcagtccaagataaaagaggagattaaagataaaactgaagattaaagagactgtgagtagtgacacattcaagtgaggctgtaaatctaggtaagtgacactaagaacctgaagagaccctatgaacttttccctaggaggccgtttccaactgccctatgacaaacagctgatcatcacgtttataatgatggttcactcacggagcttcgaacttattcatacctacatttaattgatcaccacgaatgggtaggcagacgtgtcagaccttcaggggactctccttccccacagcccccaaaccttctatacaaagtccctctgctttaagtcaaaaggtcaattctggattaaaacttgtccgcactaagtttataggaggtaacatgcaaataatgtgataaagttaaaatgacttgtcaatagcaaacattataaatgtatgctactatctcattaagtagaggacctggagaaaccataaaggtaacaaaaacccaagctaaatttcaaattttgtagtaatttcattttacagtggttgaatttacccacccaatgcttaatgaccacaaaatgtttctgcaactaaaactaaaagatagggaattataggagttgggatacatgttagatactaacgatcttcaagctttgaagatgtcattgcatgaagaaaattatgggaaacactgttcccgataattacttacacccttagtgtaacatatggagatcactgtctccgatacagacactgtggtaggtaaaaactaccttgttctttatacattatggaagatactgctcccgataatgtgttaggattgtgacaaaggtactggaaattttgcaaaatgggaattagagttacaccttggataaactgagctataaaattttgcaggagtactaccacagcctttaagtgacattgatttataacttggtcacaattcactgcatttaggaaaaccagcattcttatctggtcagtgctcgcttcttagcaacccctaattaaatttaattcatctctaaatcttagcttcaactttattcaattacatttggctgacggctgttttctaaaacccttaagtgttgaccataaatgcaaaacttccagtatctgttgggttttattagcagatgctgcttttatttaaaaaaaaccgacagtataactgtcataattatggaaggcactgcttccgataattatattctattaaaaaaacaccatttatagtgaactctgtcactgataaataaacaataaatatctcagtgccaaaaggacagaaagctctcccctaagattaacactttggccaaaatttggcagcatattattctttaaagtctgacaaactgagtctgcaactaaacacctgaaactggttctctttcaatgtgctttggaagaaacaaaaataacaaagaactaaatggaggcttatgggggaagggacagaggaaaagaaaatatactaagtctttggcttctggtcccctcttttcataaatgacactgaggttaacatattaaggccttattcctgcaatcaacagttgaacctcattttatccagcagaaggacctccatttcagacctcattggcaagaaaacaagcccatctcttctgaaagttaactgtttctttcaggaatgaggaaaccagctacattccttatggaaaggcttagatctcatttggagaaggtctttcaacctggtatctcctatttagcatcaaatgaagttggaggatcactcaaagtaagcgaccacttacaaccttcagcagagaccagcccttaggattcagagagatcattcacataactggtttctgacattttcattaacaacaacaggaaagaggcagttcccattacaaagcacttaaaattctagagataggggaatattccatcatggacattttttaagtggttattcactttaacttgaagtacaggttatctaccctgtattaaaagctgctgcctaaagacatctagtagtaccaagatgatgggatggaattttaacatcaggttttgtagccctactgaaaatttagcacgatcagcacaagtctagaaaccagactaccctgctgttctcatggaagctatgggtatcacatttaaaactcattgtcaatgtcccaaacgtcaccagagagggcatttgcagctccctgaatagtccaagtagctagagccaactggtttctgaacagcgtttcattaaaagcaccgttattttgtttacgcagtttcaagttctccagtaaagctggcagcgtgtgagagccggagccccagaagacatgtcggaaaggagactcttttggagatacgtagggagagaggaagtgatactccactctcatgacacgatcattgagtttcttcatgacaaatctgtctgttttctcagcattcccgaaatctgttgttagtctggaagtagcacggaagaagtctccacgagcagaatacagccactgtaaactcaggcccatttcctttatgtctgctctgtattggttcagatccctcacaaatgaaagcagttggctgttgtacctctcatagtccaggttcaattcaacatcatgggttagtttaatcacgaactgaccagcgacctctgcagctgctcgtgccactttgttcaactcaggaatcctctcaatcagttccttataggtgtccatggtggtacccaaataaggataatctgtgtcctcgcaaaaacagaaagaaactgctgggattccagaatatgcaaggaaagggaaagcagcattgtctaaagtgagtttctcaactttgctggcccagttgctgtcctgatatagaaattgcccagtaaccggatgcttcacattttgcattgttttctcaataagcgtatacaacagtgggctggcagaaaccttgaagttgctggtaccaagaaccgctttatccagattaatataagtgaaagcctttaaatgcagggacgaaaggtatccctctagccattcagtggcaccaaccgatccaaagtctccagcactccaactggcaaagataatgcttctgctgggctgaaacccatcttttaagaccatatctgagaacatctgggcaagtttcaataggagagctgtgcctacaccggattttgcagctccagggccccatgcatctctctgggccccaactacaacatagtgatctggttctacaaagcctttaataactccaaagatgttaagaatttttatctctttcagcacattgctcacagtgagcttcacattcttgctttctgaggttaccatcctacatgtagagtctgttttccagtcagagggacagtctccttccatattcccaaacagcttttctgcagcagctctggagattgtctggacaggtatattaggcaatcctgatgaccgagatggtggaaactgagtgtgattgaaggaagggaatccaggtgtgtaagggtcacctgtccccagatgagcatgtccaaagaatgaaagttctgcgttaacaatgggaaatttagtctggtccatgtatatcaacacaccaattgcatttaagctttcagcatttgcaaccttttctgcaaaggtgattttccctgctctgacaatcactatagatccattcacaggagtgtataaatcctcaaaatcttttttagtaccaaaattagcatggaccagtttaccagtaactgttgcagccttactatacgccacataacccccaggattctccaccaggtaaacaagtctaccgttcttatcaactatgatcaccgagttttgagcgctgtctttgacctgaatcttaacaaaatgttgatcacgccagactttgctgagtttaaattcacgaaattgattttcaacatacaacgcaagattttcatctttttgagatccagcctcacgagggacatatgaattttcattcagcagcttgatggtgctggtgaagtctgtgctgtccagtttctccgacaactttctcttcaggtcatcccaatataagcgacgtgctgcagggaagtcctctcctggctcctccctcactggagactcggttcctgccagtctctcacactcagtttttggttctacccctttacaatagcccaagtagccaatcataaatccaatcaagaaaaagacgatcacagcaatagtcccatagcagatacttccactacacctttttggttttgtgacattggcctttgtgttattgtcagcattttcttcttcatctacagcaagtttcatctccacatgactgttatcgccatctacttgccgagccaggctgaaccgggtatatgacaatggttctccaccaaacaagttagagaatgctgatctagcttgatccatcattctgaactgccacacagaagaacactagcgcgtcctccgtcccgagccgccacccgatatcccgacgctctgaggggatggcggccctaaccggcccccccaccccccccccccccctgcagcagcttttagagcagaagtaacacttccgtacaggcctagaagtaaaggcaacatccactgaggagcagttctttgatttgcaccaccaccggatctcgacttcgagcttatttatattccaaaaaaaaaaaataaaatttcaatttttaagctttcactaattccaaacccacccgctttttatagtaagtttttcacccataaataataaatacaataattaatttctcgtaaaagtagaaaatatattctaatttattgcacggtaaggaagtagatcataactcgagcatgggagatcccgtcgttttacaacgtcgtgactgggaaaaccctggcgttacccaacttaatcgccttgcagcacatccccctttcgccagctggcgtaatagcgaagaggcccgcaccgatcgcccttcccaacagttgcgcagcctgaatggcgaatggcgctttgcctggtttccggcaccagaagcggtgccggaaagctggctggagtgcgatcttcctgaggccgatactgtcgtcgtcccctcaaactggcagatgcacggttacgatgcgcccatctacaccaacgtgacctatcccattacggtcaatccgccgtttgttcccacggagaatccgacgggttgttactcgctcacatttaatgttgatgaaagctggctacaggaaggccagacgcgaattatttttgatggcgttaactcggcgtttcatctgtggtgcaacgggcgctgggtcggttacggccaggacagtcgtttgccgtctgaatttgacctgagcgcatttttacgcgccggagaaaaccgcctcgcggtgatggtgctgcgctggagtgacggcagttatctggaagatcaggatatgtggcggatgagcggcattttccgtgacgtctcgttgctgcataaaccgactacacaaatcagcgatttccatgttgccactcgctttaatgatgatttcagccgcgctgtactggaggctgaagttcagatgtgcggcgagttgcgtgactacctacgggtaacagtttctttatggcagggtgaaacgcaggtcgccagcggcaccgcgcctttcggcggtgaaattatcgatgagcgtggtggttatgccgatcgcgtcacactacgtctgaacgtcgaaaacccgaaactgtggagcgccgaaatcccgaatctctatcgtgcggtggttgaactgcacaccgccgacggcacgctgattgaagcagaagcctgcgatgtcggtttccgcgaggtgcggattgaaaatggtctgctgctgctgaacggcaagccgttgctgattcgaggcgttaaccgtcacgagcatcatcctctgcatggtcaggtcatggatgagcagacgatggtgcaggatatcctgctgatgaagcagaacaactttaacgccgtgcgctgttcgcattatccgaaccatccgctgtggtacacgctgtgcgaccgctacggcctgtatgtggtggatgaagccaatattgaaacccacggcatggtgccaatgaatcgtctgaccgatgatccgcgctggctaccggcgatgagcgaacgcgtaacgcgaatggtgcagcgcgatcgtaatcacccgagtgtgatcatctggtcgctggggaatgaatcaggccacggcgctaatcacgacgcgctgtatcgctggatcaaatctgtcgatccttcccgcccggtgcagtatgaaggcggcggagccgacaccacggccaccgatattatttgcccgatgtacgcgcgcgtggatgaagaccagcccttcccggctgtgccgaaatggtccatcaaaaaatggctttcgctacctggagagacgcgcccgctgatcctttgcgaatacgcccacgcgatgggtaacagtcttggcggtttcgctaaatactggcaggcgtttcgtcagtatccccgtttacagggcggcttcgtctgggactgggtggatcagtcgctgattaaatatgatgaaaacggcaacccgtggtcggcttacggcggtgattttggcgatacgccgaacgatcgccagttctgtatgaacggtctggtctttgccgaccgcacgccgcatccagcgctgacggaagcaaaacaccagcagcagtttttccagttccgtttatccgggcaaaccatcgaagtgaccagcgaatacctgttccgtcatagcgataacgagctcctgcactggatggtggcgctggatggtaagccgctggcaagcggtgaagtgcctctggatgtcgctccacaaggtaaacagttgattgaactgcctgaactaccgcagccggagagcgccgggcaactctggctcacagtacgcgtagtgcaaccgaacgcgaccgcatggtcagaagccgggcacatcagcgcctggcagcagtggcgtctggcggaaaacctcagtgtgacgctccccgccgcgtcccacgccatcccgcatctgaccaccagcgaaatggatttttgcatcgagctgggtaataagcgttggcaatttaaccgccagtcaggctttctttcacagatgtggattggcgataaaaaacaactgctgacgccgctgcgcgatcagttcacccgtgcaccgctggataacgacattggcgtaagtgaagcgacccgcattgaccctaacgcctgggtcgaacgctggaaggcggcgggccattaccaggccgaagcagcgttgttgcagtgcacggcagatacacttgctgatgcggtgctgattacgaccgctcacgcgtggcagcatcaggggaaaaccttatttatcagccggaaaacctaccggattgatggtagtggtcaaatggcgattaccgttgatgttgaagtggcgagcgatacaccgcatccggcgcggattggcctgaactgccagctggcgcaggtagcagagcgggtaaactggctcggattagggccgcaagaaaactatcccgaccgccttactgccgcctgttttgaccgctgggatctgccattgtcagacatgtataccccgtacgtcttcccgagcgaaaacggtctgcgctgcgggacgcgcgaattgaattatggcccacaccagtggcgcggcgacttccagttcaacatcagccgctacagtcaacagcaactgatggaaaccagccatcgccatctgctgcacgcggaagaaggcacatggctgaatatcgacggtttccatatggggattggtggcgacgactcctggagcccgtcagtatcggcggaattccagctgagcgccggtcgctaccattaccagttggtctggtgtcaaaaataataataaccgggcaggggggatccaattctgtgagcgtatggcaaacgaaggaaaaatagttatagtagccgcactcgatgggacatttcaacgtaaaccgtttaataatattttgaatcttattccattatctgaaatggtggtaaaactaactgctgtgtgtatgaaatgctttaaggaggcttccttttctaaacgattgggtgaggaaaccgagatagaaataataggaggtaatgatatgtatcaatcggtgtgtagaaagtgttacatcgactcataa

SEQ ID NO: 4 - DNA, 3812 bp, Artificial Sequence
  pNCVVhaT
gacgtctaagaaaccattattatcatgacattaacctataaaaataggcgtatcacgaggccctttcgtctcgcgcgtttcggtgatgacggtgaaaacctctgacacatgcagctcccggagacggtcacagcttgtctgtaagcggatgccgggagcagacaagcccgtcagggcgcgtcagcgggtgttggcgggtgtcggggctggcttaactatgcggcatcagagcagattgtactgagagtgcaccatatgacacgattaccaatacttttgttactaatatcattagtatacgctacaccttttcctcagacatctaaaaaaataggtgatgatgcaactctatcatgtaatcgaaataatacaaatgactacgttgttatgagtgcttggtataaggagcccaattccattattcttttagctgctaaaagcgacgtcttgtattttgataattataccaaggataaaatatcttacgactctccatacgatgatctagttacaactatcacaattaaatcattgactgctagagatgccggtacttatgtatgtgcattctttatgacatcgcctacaaatgacactgataaagtagattatgaagaatactccacagagttgattgtaaatacagatagtgaatcgactatagacataatactatctggatctacacattcaccggaaactagttctgagaaacctgattatatagataattctaattgctcgtcggtattcgaaatctaagcttcgcaggatcccgactccggaaccaattactgataaagaagaagatcatacagttacagacactgtctcatacactacagtaagtacatcatctggaattgtcactactaaatcaaccaccgatgatacgtacaatgataatgatacagtaccaccaactactgtaggcggtagtacaacctctattagcaattataaaaccaaggactttgtagaaatatttggtattaccgcattaattatattgtcggccgtggcaatattctgtattacgtattatatatgtaataaacgttcacgtaaatacaaaacagagaacaaagtctagatttttgacttacataaatgtctgggatagtaaaatctatcagaattctagaaaagtagaaaatatattctaatttattgcacgggatgagcgaaaaatacatcgtcacctgggacatgttgcagatccatgcacgtaaactcgcaagccgactgatgccttctgaacaatggaaaggcattattgccgtaagccgtggcggtctggtaccgggtgcgttactggcgcgtgaactgggtattcgtcatgtcgataccgtttgtatttccagctacgatcacgacaaccagcgcgagcttaaagtgctgaaacgcgcagaaggcgatggcgaaggcttcatcgttattgatgacctggtggataccggtggtactgcggttgcgattcgtgaaatgtatccaaaagcgcactttgtcaccatcttcgcaaaaccggctggtcgtccgctggttgatgactatgttgttgatatcccgcaagatacctggattgaacagccgtgggatatgggcgtcgtattcgtcccgccaatctccggtcgctaaggatcagcttggcgtaatcatggtcatagctgtttcctgtgtgaaattgttatccgctcacaattccacacaacatacgagccggaagcataaagtgtaaagcctggggtgcctaatgagtgagctaactcacattaattgcgttgcgctcactgcccgctttccagtcgggaaacctgtcgtgccagctgcattaatgaatcggccaacgcgcggggagaggcggtttgcgtattgggcgctcttccgcttcctcgctcactgactcgctgcgctcggtcgttcggctgcggcgagcggtatcagctcactcaaaggcggtaatacggttatccacagaatcaggggataacgcaggaaagaacatgtgagcaaaaggccagcaaaaggccaggaaccgtaaaaaggccgcgttgctggcgtttttccataggctccgcccccctgacgagcatcacaaaaatcgacgctcaagtcagaggtggcgaaacccgacaggactataaagataccaggcgtttccccctggaagctccctcgtgcgctctcctgttccgaccctgccgcttaccggatacctgtccgcctttctcccttcgggaagcgtggcgctttctcatagctcacgctgtaggtatctcagttcggtgtaggtcgttcgctccaagctgggctgtgtgcacgaaccccccgttcagcccgaccgctgcgccttatccggtaactatcgtcttgagtccaacccggtaagacacgacttatcgccactggcagcagccactggtaacaggattagcagagcgaggtatgtaggcggtgctacagagttcttgaagtggtggcctaactacggctacactagaaggacagtatttggtatctgcgctctgctgaagccagttaccttcggaaaaagagttggtagctcttgatccggcaaacaaaccaccgctggtagcggtggtttttttgtttgcaagcagcagattacgcgcagaaaaaaaggatctcaagaagatcctttgatcttttctacggggtctgacgctcagtggaacgaaaactcacgttaagggattttggtcatgagattatcaaaaaggatcttcacctagatccttttaaattaaaaatgaagttttaaatcaatctaaagtatatatgagtaaacttggtctgacagttaccaatgcttaatcagtgaggcacctatctcagcgatctgtctatttcgttcatccatagttgcctgactccccgtcgtgtagataactacgatacgggagggcttaccatctggccccagtgctgcaatgataccgcgagacccacgctcaccggctccagatttatcagcaataaaccagccagccggaagggccgagcgcagaagtggtcctgcaactttatccgcctccatccagtctattaattgttgccgggaagctagagtaagtagttcgccagttaatagtttgcgcaacgttgttgccattgctacaggcatcgtggtgtcacgctcgtcgtttggtatggcttcattcagctccggttcccaacgatcaaggcgagttacatgatcccccatgttgtgcaaaaaagcggttagctccttcggtcctccgatcgttgtcagaagtaagttggccgcagtgttatcactcatggttatggcagcactgcataattctcttactgtcatgccatccgtaagatgcttttctgtgactggtgagtactcaaccaagtcattctgagaatagtgtatgcggcgaccgagttgctcttgcccggcgtcaatacgggataataccgcgccacatagcagaactttaaaagtgctcatcattggaaaacgttcttcggggcgaaaactctcaaggatcttaccgctgttgagatccagttcgatgtaacccactcgtgcacccaactgatcttcagcatcttttactttcaccagcgtttctgggtgagcaaaaacaggaaggcaaaatgccgcaaaaaagggaataagggcgacacggaaatgttgaatactcatactcttcctttttcaatattattgaagcatttatcagggttattgtctcatgagcggatacatatttgaatgtatttagaaaaataaacaaataggggttccgcgcacatttccccgaaaagtgccacct

SEQ ID NO: 5 - DNA, 18 bp, Artificial Sequence
  Short non-coding DNA fragment containing HindIII and BamHI sites as contained in pNCVVhaT
taagcttcgcaggatccc

SEQ ID NO: 6 - DNA, 30 bp, Artificial Sequence
  Forward primer for amplifying left flanking DNA from the LIVP HA gene
gcgcatatgacacgattaccaatacttttg

SEQ ID NO: 7 - DNA, 41 bp, Artificial Sequence
  Reverse primer for amplifying left flanking DNA from the LIVP HA gene
gtcgggatcctgcgaagcttagatttcgaataccgacgagc

SEQ ID NO: 8 - DNA, 44 bp, Artificial Sequence
  Forward primer for amplifying right flanking DNA from the LIVP HA gene
gaaatctaagcttcgcaggatcccgactccggaaccaattactg

SEQ ID NO: 9 - DNA, 30 bp, Artificial Sequence
  Reverse primer for amplifying right flanking DNA from the LIVP HA gene
gcggaattctgatagattttactatcccag

SEQ ID NO: 10 - DNA, 3142 bp, Artificial Sequence
  pUCP7.5-gpt-1
gacgtctaagaaaccattattatcatgacattaacctataaaaataggcgtatcacgaggccctttcgtctcgcgcgtttcggtgatgacggtgaaaacctctgacacatgcagctcccggagacggtcacagcttgtctgtaagcggatgccgggagcagacaagcccgtcagggcgcgtcagcgggtgttggcgggtgtcggggctggcttaactatgcggcatcagagcagattgtactgagagtgcaccatatgcggtgtgaaataccgcacagatgcgtaaggagaaaataccgcatcaggcgccattcgccattcaggctgcgcaactgttgggaagggcgatcggtgcgggcctcttcgctattacgccagctggcgaaagggggatgtgctgcaaggcgattaagttgggtaacgccagggttttcccagtcacgacgttgtaaaacgacggccagtgaattctagaaaagtagaaaatatattctaatttattgcacgggatgagcgaaaaatacatcgtcacctgggacatgttgcagatccatgcacgtaaactcgcaagccgactgatgccttctgaacaatggaaaggcattattgccgtaagccgtggcggtctggtaccgggtgcgttactggcgcgtgaactgggtattcgtcatgtcgataccgtttgtatttccagctacgatcacgacaaccagcgcgagcttaaagtgctgaaacgcgcagaaggcgatggcgaaggcttcatcgttattgatgacctggtggataccggtggtactgcggttgcgattcgtgaaatgtatccaaaagcgcactttgtcaccatcttcgcaaaaccggctggtcgtccgctggttgatgactatgttgttgatatcccgcaagatacctggattgaacagccgtgggatatgggcgtcgtattcgtcccgccaatctccggtcgctaaggatcagcttggcgtaatcatggtcatagctgtttcctgtgtgaaattgttatccgctcacaattccacacaacatacgagccggaagcataaagtgtaaagcctggggtgcctaatgagtgagctaactcacattaattgcgttgcgctcactgcccgctttccagtcgggaaacctgtcgtgccagctgcattaatgaatcggccaacgcgcggggagaggcggtttgcgtattgggcgctcttccgcttcctcgctcactgactcgctgcgctcggtcgttcggctgcggcgagcggtatcagctcactcaaaggcggtaatacggttatccacagaatcaggggataacgcaggaaagaacatgtgagcaaaaggccagcaaaaggccaggaaccgtaaaaaggccgcgttgctggcgtttttccataggctccgcccccctgacgagcatcacaaaaatcgacgctcaagtcagaggtggcgaaacccgacaggactataaagataccaggcgtttccccctggaagctccctcgtgcgctctcctgttccgaccctgccgcttaccggatacctgtccgcctttctcccttcgggaagcgtggcgctttctcatagctcacgctgtaggtatctcagttcggtgtaggtcgttcgctccaagctgggctgtgtgcacgaaccccccgttcagcccgaccgctgcgccttatccggtaactatcgtcttgagtccaacccggtaagacacgacttatcgccactggcagcagccactggtaacaggattagcagagcgaggtatgtaggcggtgctacagagttcttgaagtggtggcctaactacggctacactagaaggacagtatttggtatctgcgctctgctgaagccagttaccttcggaaaaagagttggtagctcttgatccggcaaacaaaccaccgctggtagcggtggtttttttgtttgcaagcagcagattacgcgcagaaaaaaaggatctcaagaagatcctttgatcttttctacggggtctgacgctcagtggaacgaaaactcacgttaagggattttggtcatgagattatcaaaaaggatcttcacctagatccttttaaattaaaaatgaagttttaaatcaatctaaagtatatatgagtaaacttggtctgacagttaccaatgcttaatcagtgaggcacctatctcagcgatctgtctatttcgttcatccatagttgcctgactccccgtcgtgtagataactacgatacgggagggcttaccatctggccccagtgctgcaatgataccgcgagacccacgctcaccggctccagatttatcagcaataaaccagccagccggaagggccgagcgcagaagtggtcctgcaactttatccgcctccatccagtctattaattgttgccgggaagctagagtaagtagttcgccagttaatagtttgcgcaacgttgttgccattgctacaggcatcgtggtgtcacgctcgtcgtttggtatggcttcattcagctccggttcccaacgatcaaggcgagttacatgatcccccatgttgtgcaaaaaagcggttagctccttcggtcctccgatcgttgtcagaagtaagttggccgcagtgttatcactcatggttatggcagcactgcataattctcttactgtcatgccatccgtaagatgcttttctgtgactggtgagtactcaaccaagtcattctgagaatagtgtatgcggcgaccgagttgctcttgcccggcgtcaatacgggataataccgcgccacatagcagaactttaaaagtgctcatcattggaaaacgttcttcggggcgaaaactctcaaggatcttaccgctgttgagatccagttcgatgtaacccactcgtgcacccaactgatcttcagcatcttttactttcaccagcgtttctgggtgagcaaaaacaggaaggcaaaatgccgcaaaaaagggaataagggcgacacggaaatgttgaatactcatactcttcctttttcaatattattgaagcatttatcagggttattgtctcatgagcggatacatatttgaatgtatttagaaaaataaacaaataggggttccgcgcacatttccccgaaaagtgccacct

SEQ ID NO: 11 - DNA, 4059 bp, Artificial Sequence
  pNCVVf14.5lT
gacgtctaagaaaccattattatcatgacattaacctataaaaataggcgtatcacgaggccctttcgtctcgcgcgtttcggtgatgacggtgaaaacctctgacacatgcagctcccggagacggtcacagcttgtctgtaagcggatgccgggagcagacaagcccgtcagggcgcgtcagcgggtgttggcgggtgtcggggctggcttaactatgcggcatcagagcagattgtactgagagtgcaccatatgtagaagaattgataaatatgaaaccttttaagaatatgaataaaataacaattaatcaaaaggataattgtatattagcaaatcgatgctttgttaaaatagatactcctagatacataccatcgacatccattagcagttctaatatcatcagaatacggaatcatgattttacattatctgaattattgtattcaccgtttcattttcaacagcctcagtttcaatatctccttcctgggtttgtattaacgtgtattgataaagtttcgaaacagcaaaaagaatgtaaatattgtatctctaatcgtggagatgatgatagtttaagcattaatctatttattccgactattaacaagtctatatatattattatcggtttacggatgaaaaatttttggaagcctaaattcgaaatagaataatgtttttatattatacatgtgctaaaagaatgatcgatacagtttaagtgaaagctagagaggggtttttaaatggtcatcggtttagtcatattcgtgtctgtaagcttcgcaggatcctgcggccgccatcgtcggtgtgttgtctaacgtattggacatgtttatgtacgtagaagaaaataatgaagaggatgctagaatcaaggaggagcaagaactactgttgctatattaatacataattgaaaatctaccaacttaaatacaccgcctataaatttacaatgaaacacagattgtattctgaaggattgagtattagtaatgatttaaactcgataatcggtcaacaatctacaatggatacggatatagaaatagacgaagatgacatcatggaacttcttaatatattgactgagttaggttgtgatgtcgactttgatgaaaattttagcgatatagccgatgatattctagaatcgttgatagaacaggatgtataagtttttatgttaactaaatgtggccatttgcatcggtacctgcgggagcaaaatgtaggctggtagaaacactaccagaaaatatggattttagatccgatcatttaacaacatttgaatgttttaacgaaattatcactctagctaagaaatatatatacatagcatctttttgttgtaatcctctgaattctagaaaagtagaaaatatattctaatttattgcacgggatgagcgaaaaatacatcgtcacctgggacatgttgcagatccatgcacgtaaactcgcaagccgactgatgccttctgaacaatggaaaggcattattgccgtaagccgtggcggtctggtaccgggtgcgttactggcgcgtgaactgggtattcgtcatgtcgataccgtttgtatttccagctacgatcacgacaaccagcgcgagcttaaagtgctgaaacgcgcagaaggcgatggcgaaggcttcatcgttattgatgacctggtggataccggtggtactgcggttgcgattcgtgaaatgtatccaaaagcgcactttgtcaccatcttcgcaaaaccggctggtcgtccgctggttgatgactatgttgttgatatcccgcaagatacctggattgaacagccgtgggatatgggcgtcgtattcgtcccgccaatctccggtcgctaaggatcagcttggcgtaatcatggtcatagctgtttcctgtgtgaaattgttatccgctcacaattccacacaacatacgagccggaagcataaagtgtaaagcctggggtgcctaatgagtgagctaactcacattaattgcgttgcgctcactgcccgctttccagtcgggaaacctgtcgtgccagctgcattaatgaatcggccaacgcgcggggagaggcggtttgcgtattgggcgctcttccgcttcctcgctcactgactcgctgcgctcggtcgttcggctgcggcgagcggtatcagctcactcaaaggcggtaatacggttatccacagaatcaggggataacgcaggaaagaacatgtgagcaaaaggccagcaaaaggccaggaaccgtaaaaaggccgcgttgctggcgtttttccataggctccgcccccctgacgagcatcacaaaaatcgacgctcaagtcagaggtggcgaaacccgacaggactataaagataccaggcgtttccccctggaagctccctcgtgcgctctcctgttccgaccctgccgcttaccggatacctgtccgcctttctcccttcgggaagcgtggcgctttctcatagctcacgctgtaggtatctcagttcggtgtaggtcgttcgctccaagctgggctgtgtgcacgaaccccccgttcagcccgaccgctgcgccttatccggtaactatcgtcttgagtccaacccggtaagacacgacttatcgccactggcagcagccactggtaacaggattagcagagcgaggtatgtaggcggtgctacagagttcttgaagtggtggcctaactacggctacactagaaggacagtatttggtatctgcgctctgctgaagccagttaccttcggaaaaagagttggtagctcttgatccggcaaacaaaccaccgctggtagcggtggtttttttgtttgcaagcagcagattacgcgcagaaaaaaaggatctcaagaagatcctttgatcttttctacggggtctgacgctcagtggaacgaaaactcacgttaagggattttggtcatgagattatcaaaaaggatcttcacctagatccttttaaattaaaaatgaagttttaaatcaatctaaagtatatatgagtaaacttggtctgacagttaccaatgcttaatcagtgaggcacctatctcagcgatctgtctatttcgttcatccatagttgcctgactccccgtcgtgtagataactacgatacgggagggcttaccatctggccccagtgctgcaatgataccgcgagacccacgctcaccggctccagatttatcagcaataaaccagccagccggaagggccgagcgcagaagtggtcctgcaactttatccgcctccatccagtctattaattgttgccgggaagctagagtaagtagttcgccagttaatagtttgcgcaacgttgttgccattgctacaggcatcgtggtgtcacgctcgtcgtttggtatggcttcattcagctccggttcccaacgatcaaggcgagttacatgatcccccatgttgtgcaaaaaagcggttagctccttcggtcctccgatcgttgtcagaagtaagttggccgcagtgttatcactcatggttatggcagcactgcataattctcttactgtcatgccatccgtaagatgcttttctgtgactggtgagtactcaaccaagtcattctgagaatagtgtatgcggcgaccgagttgctcttgcccggcgtcaatacgggataataccgcgccacatagcagaactttaaaagtgctcatcattggaaaacgttcttcggggcgaaaactctcaaggatcttaccgctgttgagatccagttcgatgtaacccactcgtgcacccaactgatcttcagcatcttttactttcaccagcgtttctgggtgagcaaaaacaggaaggcaaaatgccgcaaaaaagggaataagggcgacacggaaatgttgaatactcatactcttcctttttcaatattattgaagcatttatcagggttattgtctcatgagcggatacatatttgaatgtatttagaaaaataaacaaataggggttccgcgcacatttccccgaaaagtgccacct

SEQ ID NO: 12 - DNA, 16 bp, Artificial Sequence
  Short non-coding DNA fragment containing Bam HI and HindIII sites as contained in pNCVVf14.5lT
aggatcctgcgaagct

SEQ ID NO: 13 - DNA, 29 bp, Artificial Sequence
  Forward primer for amplifying left flanking DNA from the LIVP 14.5L gene
gcgcatatgtagaagaattgataaatatg

SEQ ID NO: 14 - DNA, 49 bp, Artificial Sequence
  Reverse primer for amplifying left flanking DNA from the LIVP 14.5L gene
gccgcaggatcctgcgaagcttacagacacgaatatgactaaaccgatg

SEQ ID NO: 15 - DNA, 49 bp, Artificial Sequence
  Forward primer for amplifying right flanking DNA from the LIVP 14.5L gene
gtctgtaagcttcgcaggatcctgcggccgccatcgtcggtgtgttgtc

SEQ ID NO: 16 - DNA, 31 bp, Artificial Sequence
  Reverse primer for amplifying right flanking DNA from the LIVP 14.5L gene
gcggaattcagaggattacaacaaaaagatg

SEQ ID NO: 17 - DNA, 5458 bp, Artificial Sequence
  pCR-TKLR-gpt2
agcgcccaatacgcaaaccgcctctccccgcgcgttggccgattcattaatgcagctggcacgacaggtttcccgactggaaagcgggcagtgagcgcaacgcaattaatgtgagttagctcactcattaggcaccccaggctttacactttatgcttccggctcgtatgttgtgtggaattgtgagcggataacaatttcacacaggaaacagctatgaccatgattacgccaagctttgttacagatggaagggtcaaacttaataaaggatatttgttcgactttgtgattagtttgatgcgattcaaaaaagaatcctctctagctaccaccgcaatagatcctgttagatacatagatcctcgtcgtgatatcgcattttctaacgtgatggatatattaaagtcgaataaagtgaacaataattaattctttattgtcatcatgaacggcggacatattcagttgataatcggccccatgttttcaggtaaaagtacagaattaattagacgagttagacgttatcaaatagctcaatataaatgcgtgactataaaatattctaacgataatagatacggaacgggactatggacgcatgataagaataattttgaagcattggaagcaactaaactatgtgatgtcttggaatcaattacagatttctccgtgataggtatcgatgaaggacagttctttccagacattgtttaattctgtgagcgtatggcaaacggtaccgagctcggatccttctgtgagcgtatggcaaacgaaggaaaaatagttatagtagccgcactcgatgggacatttcaacgtaaaccgtttaataatattttgaatcttattccattatctgaaatggtggtaaaactaactgctgtgtgtatgaaatgctttaaggaggcttccttttctaaacgattgggtgaggaaaccgagatagagataataggaggtaatgatatgtatcaatcggtgtgtagaaagtgttacgtcggctcataatattatattttttatctaaaaaactaaaaataaacattgattaaattttaatataatacttaaaaatggatgttgtgtcgttagataaaccgtttatgtattttgaggaaattgataatgagttagattacgaaccagaaagtgcaaatgaggtcgcaaaaaaactgccgtatcaaggacagttaaaactattactaggagaattattttttcttagtaagttacagcgacacggtatattagatggtgccaccgtagtgtactagttaacggccgccagtgtgctggaattctagaaaagtagaaaatatattctaatttattgcacgggatgagcgaaaaatacatcgtcacctgggacatgttgcagatccatgcacgtaaactcgcaagccgactgatgccttctgaacaatggaaaggcattattgccgtaagccgtggcggtctggtaccgggtgcgttactggcgcgtgaactgggtattcgtcatgtcgataccgtttgtatttccagctacgatcacgacaaccagcgcgagcttaaagtgctgaaacgcgcagaaggcgatggcgaaggcttcatcgttattgatgacctggtggataccggtggtactgcggttgcgattcgtgaaatgtatccaaaagcgcactttgtcaccatcttcgcaaaaccggctggtcgtccgctggttgatgactatgttgttgatatcccgcaagatacctggattgaacagccgtgggatatgggcgtcgtattcgtcccgccaatctccggtcgctaaggatcagcttggcgtaatcaagccgaattctgcagatatccatcacactggcggccgctcgagcatgcatctagagggcccaattcgccctatagtgagtcgtattacaattcactggccgtcgttttacaacgtcgtgactgggaaaaccctggcgttacccaacttaatcgccttgcagcacatccccctttcgccagctggcgtaatagcgaagaggcccgcaccgatcgcccttcccaacagttgcgcagcctgaatggcgaatggacgcgccctgtagcggcgcattaagcgcggcgggtgtggtggttacgcgcagcgtgaccgctacacttgccagcgccctagcgcccgctcctttcgctttcttcccttcctttctcgccacgttcgccggctttccccgtcaagctctaaatcgggggctccctttagggttccgatttagtgctttacggcacctcgaccccaaaaaacttgattagggtgatggttcacgtagtgggccatcgccctgatagacggtttttcgccctttgacgttggagtccacgttctttaatagtggactcttgttccaaactggaacaacactcaaccctatctcggtctattcttttgatttataagggattttgccgatttcggcctattggttaaaaaatgagctgatttaacaaaaatttaacgcgaattttaacaaaattcagggcgcaagggctgctaaaggaagcggaacacgtagaaagccagtccgcagaaacggtgctgaccccggatgaatgtcagctactgggctatctggacaagggaaaacgcaagcgcaaagagaaagcaggtagcttgcagtgggcttacatggcgatagctagactgggcggttttatggacagcaagcgaaccggaattgccagctggggcgccctctggtaaggttgggaagccctgcaaagtaaactggatggctttcttgccgccaaggatctgatggcgcaggggatcaagatctgatcaagagacaggatgaggatcgtttcgcatgattgaacaagatggattgcacgcaggttctccggccgcttgggtggagaggctattcggctatgactgggcacaacagacaatcggctgctctgatgccgccgtgttccggctgtcagcgcaggggcgcccggttctttttgtcaagaccgacctgtccggtgccctgaatgaactgcaggacgaggcagcgcggctatcgtggctggccacgacgggcgttccttgcgcagctgtgctcgacgttgtcactgaagcgggaagggactggctgctattgggcgaagtgccggggcaggatctcctgtcatcccaccttgctcctgccgagaaagtatccatcatggctgatgcaatgcggcggctgcatacgcttgatccggctacctgcccattcgaccaccaagcgaaacatcgcatcgagcgagcacgtactcggatggaagccggtcttgtcgatcaggatgatctggacgaagagcatcaggggctcgcgccagccgaactgttcgccaggctcaaggcgcgcatgcccgacggcgaggatctcgtcgtgacccatggcgatgcctgcttgccgaatatcatggtggaaaatggccgcttttctggattcatcgactgtggccggctgggtgtggcggaccgctatcaggacatagcgttggctacccgtgatattgctgaagagcttggcggcgaatgggctgaccgcttcctcgtgctttacggtatcgccgctcccgattcgcagcgcatcgccttctatcgccttcttgacgagttcttctgaattgaaaaaggaagagtatgagtattcaacatttccgtgtcgcccttattcccttttttgcggcattttgccttcctgtttttgctcacccagaaacgctggtgaaagtaaaagatgctgaagatcagttgggtgcacgagtgggttacatcgaactggatctcaacagcggtaagatccttgagagttttcgccccgaagaacgttttccaatgatgagcacttttaaagttctgctatgtggcgcggtattatcccgtattgacgccgggcaagagcaactcggtcgccgcatacactattctcagaatgacttggttgagtactcaccagtcacagaaaagcatcttacggatggcatgacagtaagagaattatgcagtgctgccataaccatgagtgataacactgcggccaacttacttctgacaacgatcggaggaccgaaggagctaaccgcttttttgcacaacatgggggatcatgtaactcgccttgatcgttgggaaccggagctgaatgaagccataccaaacgacgagcgtgacaccacgatgcctgtagcaatggcaacaacgttgcgcaaactattaactggcgaactacttactctagcttcccggcaacaattaatagactggatggaggcggataaagttgcaggaccacttctgcgctcggcccttccggctggctggtttattgctgataaatctggagccggtgagcgtgggtctcgcggtatcattgcagcactggggccagatggtaagccctcccgtatcgtagttatctacacgacggggagtcaggcaactatggatgaacgaaatagacagatcgctgagataggtgcctcactgattaagcattggtaactgtcagaccaagtttactcatatatactttagattgatttaaaacttcatttttaatttaaaaggatctaggtgaagatcctttttgataatctcatgaccaaaatcccttaacgtgagttttcgttccactgagcgtcagaccccgtagaaaagatcaaaggatcttcttgagatcctttttttctgcgcgtaatctgctgcttgcaaacaaaaaaaccaccgctaccagcggtggtttgtttgccggatcaagagctaccaactctttttccgaaggtaactggcttcagcagagcgcagataccaaatactgttcttctagtgtagccgtagttaggccaccacttcaagaactctgtagcaccgcctacatacctcgctctgctaatcctgttaccagtggctgctgccagtggcgataagtcgtgtcttaccgggttggactcaagacgatagttaccggataaggcgcagcggtcgggctgaacggggggttcgtgcacacagcccagcttggagcgaacgacctacaccgaactgagatacctacagcgtgagctatgagaaagcgccacgcttcccgaagggagaaaggcggacaggtatccggtaagcggcagggtcggaacaggagagcgcacgagggagcttccagggggaaacgcctggtatctttatagtcctgtcgggtttcgccacctctgacttgagcgtcgatttttgtgatgctcgtcaggggggcggagcctatggaaaaacgccagcaacgcggcctttttacggttcctggccttttgctggccttttgctcacatgttctttcctgcgttatcccctgattctgtggataaccgtattaccgcctttgagtgagctgataccgctcgccgcagccgaacgttgtttaattctgtgagcgtatggcaaacg

SEQ ID NO: 18 - DNA, 18 bp, Artificial Sequence
  Short non-coding DNA fragment containing SacI and Bam HI sites contained in pCR-TKLR-gpt2
ggtaccgagctcggatcc

SEQ ID NO: 19 - DNA, 30 bp, Artificial Sequence
  Primer TKL-5
ataagctttgttacagatggaagggtcaaa

SEQ ID NO: 20 - DNA, 27 bp, Artificial Sequence
  Primer TKL-3
aggtaccgtttgccatacgctcacaga

SEQ ID NO: 21 - DNA, 3929 bp, Artificial Sequence
  Vector pCR2.1
agcgcccaatacgcaaaccgcctctccccgcgcgttggccgattcattaatgcagctggcacgacaggtttcccgactggaaagcgggcagtgagcgcaacgcaattaatgtgagttagctcactcattaggcaccccaggctttacactttatgcttccggctcgtatgttgtgtggaattgtgagcggataacaatttcacacaggaaacagctatgaccatgattacgccaagcttggtaccgagctcggatccactagtaacggccgccagtgtgctggaattcggcttaagccgaattctgcagatatccatcacactggcggccgctcgagcatgcatctagagggcccaattcgccctatagtgagtcgtattacaattcactggccgtcgttttacaacgtcgtgactgggaaaaccctggcgttacccaacttaatcgccttgcagcacatccccctttcgccagctggcgtaatagcgaagaggcccgcaccgatcgcccttcccaacagttgcgcagcctgaatggcgaatggacgcgccctgtagcggcgcattaagcgcggcgggtgtggtggttacgcgcagcgtgaccgctacacttgccagcgccctagcgcccgctcctttcgctttcttcccttcctttctcgccacgttcgccggctttccccgtcaagctctaaatcgggggctccctttagggttccgatttagtgctttacggcacctcgaccccaaaaaacttgattagggtgatggttcacgtagtgggccatcgccctgatagacggtttttcgccctttgacgttggagtccacgttctttaatagtggactcttgttccaaactggaacaacactcaaccctatctcggtctattcttttgatttataagggattttgccgatttcggcctattggttaaaaaatgagctgatttaacaaaaatttaacgcgaattttaacaaaattcagggcgcaagggctgctaaaggaagcggaacacgtagaaagccagtccgcagaaacggtgctgaccccggatgaatgtcagctactgggctatctggacaagggaaaacgcaagcgcaaagagaaagcaggtagcttgcagtgggcttacatggcgatagctagactgggcggttttatggacagcaagcgaaccggaattgccagctggggcgccctctggtaaggttgggaagccctgcaaagtaaactggatggctttcttgccgccaaggatctgatggcgcaggggatcaagatctgatcaagagacaggatgaggatcgtttcgcatgattgaacaagatggattgcacgcaggttctccggccgcttgggtggagaggctattcggctatgactgggcacaacagacaatcggctgctctgatgccgccgtgttccggctgtcagcgcaggggcgcccggttctttttgtcaagaccgacctgtccggtgccctgaatgaactgcaggacgaggcagcgcggctatcgtggctggccacgacgggcgttccttgcgcagctgtgctcgacgttgtcactgaagcgggaagggactggctgctattgggcgaagtgccggggcaggatctcctgtcatcccaccttgctcctgccgagaaagtatccatcatggctgatgcaatgcggcggctgcatacgcttgatccggctacctgcccattcgaccaccaagcgaaacatcgcatcgagcgagcacgtactcggatggaagccggtcttgtcgatcaggatgatctggacgaagagcatcaggggctcgcgccagccgaactgttcgccaggctcaaggcgcgcatgcccgacggcgaggatctcgtcgtgacccatggcgatgcctgcttgccgaatatcatggtggaaaatggccgcttttctggattcatcgactgtggccggctgggtgtggcggaccgctatcaggacatagcgttggctacccgtgatattgctgaagagcttggcggcgaatgggctgaccgcttcctcgtgctttacggtatcgccgctcccgattcgcagcgcatcgccttctatcgccttcttgacgagttcttctgaattgaaaaaggaagagtatgagtattcaacatttccgtgtcgcccttattcccttttttgcggcattttgccttcctgtttttgctcacccagaaacgctggtgaaagtaaaagatgctgaagatcagttgggtgcacgagtgggttacatcgaactggatctcaacagcggtaagatccttgagagttttcgccccgaagaacgttttccaatgatgagcacttttaaagttctgctatgtggcgcggtattatcccgtattgacgccgggcaagagcaactcggtcgccgcatacactattctcagaatgacttggttgagtactcaccagtcacagaaaagcatcttacggatggcatgacagtaagagaattatgcagtgctgccataaccatgagtgataacactgcggccaacttacttctgacaacgatcggaggaccgaaggagctaaccgcttttttgcacaacatgggggatcatgtaactcgccttgatcgttgggaaccggagctgaatgaagccataccaaacgacgagcgtgacaccacgatgcctgtagcaatggcaacaacgttgcgcaaactattaactggcgaactacttactctagcttcccggcaacaattaatagactggatggaggcggataaagttgcaggaccacttctgcgctcggcccttccggctggctggtttattgctgataaatctggagccggtgagcgtgggtctcgcggtatcattgcagcactggggccagatggtaagccctcccgtatcgtagttatctacacgacggggagtcaggcaactatggatgaacgaaatagacagatcgctgagataggtgcctcactgattaagcattggtaactgtcagaccaagtttactcatatatactttagattgatttaaaacttcatttttaatttaaaaggatctaggtgaagatcctttttgataatctcatgaccaaaatcccttaacgtgagttttcgttccactgagcgtcagaccccgtagaaaagatcaaaggatcttcttgagatcctttttttctgcgcgtaatctgctgcttgcaaacaaaaaaaccaccgctaccagcggtggtttgtttgccggatcaagagctaccaactctttttccgaaggtaactggcttcagcagagcgcagataccaaatactgttcttctagtgtagccgtagttaggccaccacttcaagaactctgtagcaccgcctacatacctcgctctgctaatcctgttaccagtggctgctgccagtggcgataagtcgtgtcttaccgggttggactcaagacgatagttaccggataaggcgcagcggtcgggctgaacggggggttcgtgcacacagcccagcttggagcgaacgacctacaccgaactgagatacctacagcgtgagctatgagaaagcgccacgcttcccgaagggagaaaggcggacaggtatccggtaagcggcagggtcggaacaggagagcgcacgagggagcttccagggggaaacgcctggtatctttatagtcctgtcgggtttcgccacctctgacttgagcgtcgatttttgtgatgctcgtcaggggggcggagcctatggaaaaacgccagcaacgcggcctttttacggttcctggccttttgctggccttttgctcacatgttctttcctgcgttatcccctgattctgtggataaccgtattaccgcctttgagtgagctgataccgctcgccgcagccgaacgaccgagcgcagcgagtcagtgagcgaggaagcggaag

SEQ ID NO: 22 - DNA, 4412 bp, Artificial Sequence
  pCR-TKL1
agcgcccaatacgcaaaccgcctctccccgcgcgttggccgattcattaatgcagctggcacgacaggtttcccgactggaaagcgggcagtgagcgcaacgcaattaatgtgagttagctcactcattaggcaccccaggctttacactttatgcttccggctcgtatgttgtgtggaattgtgagcggataacaatttcacacaggaaacagctatgaccatgattacgccaagctttgttacagatggaagggtcaaacttaataaaggatatttgttcgactttgtgattagtttgatgcgattcaaaaaagaatcctctctagctaccaccgcaatagatcctgttagatacatagatcctcgtcgtgatatcgcattttctaacgtgatggatatattaaagtcgaataaagtgaacaataattaattctttattgtcatcatgaacggcggacatattcagttgataatcggccccatgttttcaggtaaaagtacagaattaattagacgagttagacgttatcaaatagctcaatataaatgcgtgactataaaatattctaacgataatagatacggaacgggactatggacgcatgataagaataattttgaagcattggaagcaactaaactatgtgatgtcttggaatcaattacagatttctccgtgataggtatcgatgaaggacagttctttccagacattgtttaattctgtgagcgtatggcaaacggtaccgagctcggatccactagttaacggccgccagtgtgctggaattctgcagatatccatcacactggcggccgctcgagcatgcatctagagggcccaattcgccctatagtgagtcgtattacaattcactggccgtcgttttacaacgtcgtgactgggaaaaccctggcgttacccaacttaatcgccttgcagcacatccccctttcgccagctggcgtaatagcgaagaggcccgcaccgatcgcccttcccaacagttgcgcagcctgaatggcgaatggacgcgccctgtagcggcgcattaagcgcggcgggtgtggtggttacgcgcagcgtgaccgctacacttgccagcgccctagcgcccgctcctttcgctttcttcccttcctttctcgccacgttcgccggctttccccgtcaagctctaaatcgggggctccctttagggttccgatttagtgctttacggcacctcgaccccaaaaaacttgattagggtgatggttcacgtagtgggccatcgccctgatagacggtttttcgccctttgacgttggagtccacgttctttaatagtggactcttgttccaaactggaacaacactcaaccctatctcggtctattcttttgatttataagggattttgccgatttcggcctattggttaaaaaatgagctgatttaacaaaaatttaacgcgaattttaacaaaattcagggcgcaagggctgctaaaggaagcggaacacgtagaaagccagtccgcagaaacggtgctgaccccggatgaatgtcagctactgggctatctggacaagggaaaacgcaagcgcaaagagaaagcaggtagcttgcagtgggcttacatggcgatagctagactgggcggttttatggacagcaagcgaaccggaattgccagctggggcgccctctggtaaggttgggaagccctgcaaagtaaactggatggctttcttgccgccaaggatctgatggcgcaggggatcaagatctgatcaagagacaggatgaggatcgtttcgcatgattgaacaagatggattgcacgcaggttctccggccgcttgggtggagaggctattcggctatgactgggcacaacagacaatcggctgctctgatgccgccgtgttccggctgtcagcgcaggggcgcccggttctttttgtcaagaccgacctgtccggtgccctgaatgaactgcaggacgaggcagcgcggctatcgtggctggccacgacgggcgttccttgcgcagctgtgctcgacgttgtcactgaagcgggaagggactggctgctattgggcgaagtgccggggcaggatctcctgtcatcccaccttgctcctgccgagaaagtatccatcatggctgatgcaatgcggcggctgcatacgcttgatccggctacctgcccattcgaccaccaagcgaaacatcgcatcgagcgagcacgtactcggatggaagccggtcttgtcgatcaggatgatctggacgaagagcatcaggggctcgcgccagccgaactgttcgccaggctcaaggcgcgcatgcccgacggcgaggatctcgtcgtgacccatggcgatgcctgcttgccgaatatcatggtggaaaatggccgcttttctggattcatcgactgtggccggctgggtgtggcggaccgctatcaggacatagcgttggctacccgtgatattgctgaagagcttggcggcgaatgggctgaccgcttcctcgtgctttacggtatcgccgctcccgattcgcagcgcatcgccttctatcgccttcttgacgagttcttctgaattgaaaaaggaagagtatgagtattcaacatttccgtgtcgcccttattcccttttttgcggcattttgccttcctgtttttgctcacccagaaacgctggtgaaagtaaaagatgctgaagatcagttgggtgcacgagtgggttacatcgaactggatctcaacagcggtaagatccttgagagttttcgccccgaagaacgttttccaatgatgagcacttttaaagttctgctatgtggcgcggtattatcccgtattgacgccgggcaagagcaactcggtcgccgcatacactattctcagaatgacttggttgagtactcaccagtcacagaaaagcatcttacggatggcatgacagtaagagaattatgcagtgctgccataaccatgagtgataacactgcggccaacttacttctgacaacgatcggaggaccgaaggagctaaccgcttttttgcacaacatgggggatcatgtaactcgccttgatcgttgggaaccggagctgaatgaagccataccaaacgacgagcgtgacaccacgatgcctgtagcaatggcaacaacgttgcgcaaactattaactggcgaactacttactctagcttcccggcaacaattaatagactggatggaggcggataaagttgcaggaccacttctgcgctcggcccttccggctggctggtttattgctgataaatctggagccggtgagcgtgggtctcgcggtatcattgcagcactggggccagatggtaagccctcccgtatcgtagttatctacacgacggggagtcaggcaactatggatgaacgaaatagacagatcgctgagataggtgcctcactgattaagcattggtaactgtcagaccaagtttactcatatatactttagattgatttaaaacttcatttttaatttaaaaggatctaggtgaagatcctttttgataatctcatgaccaaaatcccttaacgtgagttttcgttccactgagcgtcagaccccgtagaaaagatcaaaggatcttcttgagatcctttttttctgcgcgtaatctgctgcttgcaaacaaaaaaaccaccgctaccagcggtggtttgtttgccggatcaagagctaccaactctttttccgaaggtaactggcttcagcagagcgcagataccaaatactgttcttctagtgtagccgtagttaggccaccacttcaagaactctgtagcaccgcctacatacctcgctctgctaatcctgttaccagtggctgctgccagtggcgataagtcgtgtcttaccgggttggactcaagacgatagttaccggataaggcgcagcggtcgggctgaacggggggttcgtgcacacagcccagcttggagcgaacgacctacaccgaactgagatacctacagcgtgagctatgagaaagcgccacgcttcccgaagggagaaaggcggacaggtatccggtaagcggcagggtcggaacaggagagcgcacgagggagcttccagggggaaacgcctggtatctttatagtcctgtcgggtttcgccacctctgacttgagcgtcgatttttgtgatgctcgtcaggggggcggagcctatggaaaaacgccagcaacgcggcctttttacggttcctggccttttgctggccttttgctcacatgttctttcctgcgttatcccctgattctgtggataaccgtattaccgcctttgagtgagctgataccgctcgccgcagccgaacgttgtttaattctgtgagcgtatggcaaacg

SEQ ID NO: 23 - DNA, 33 bp, Artificial Sequence
  Primer TKR-5 (right flank)
tgagctcggatccttctgtgagcgtatggcaaa

SEQ ID NO: 24 - DNA, 28 bp, Artificial Sequence
  Primer TKR-3 (right flank)
ttactagtacactacggtggcaccatct

SEQ ID NO: 25 - DNA, 4426 bp, Artificial Sequence
  pCR-TKR4
agcgcccaatacgcaaaccgcctctccccgcgcgttggccgattcattaatgcagctggcacgacaggtttcccgactggaaagcgggcagtgagcgcaacgcaattaatgtgagttagctcactcattaggcaccccaggctttacactttatgcttccggctcgtatgttgtgtggaattgtgagcggataacaatttcacacaggaaacagctatgaccatgattacgccaagcttggtaccgagctcggatccttctgtgagcgtatggcaaacgaaggaaaaatagttatagtagccgcactcgatgggacatttcaacgtaaaccgtttaataatattttgaatcttattccattatctgaaatggtggtaaaactaactgctgtgtgtatgaaatgctttaaggaggcttccttttctaaacgattgggtgaggaaaccgagatagagataataggaggtaatgatatgtatcaatcggtgtgtagaaagtgttacgtcggctcataatattatattttttatctaaaaaactaaaaataaacattgattaaattttaatataatacttaaaaatggatgttgtgtcgttagataaaccgtttatgtattttgaggaaattgataatgagttagattacgaaccagaaagtgcaaatgaggtcgcaaaaaaactgccgtatcaaggacagttaaaactattactaggagaattattttttcttagtaagttacagcgacacggtatattagatggtgccaccgtagtgtactagttaacggccgccagtgtgctggaattctgcagatatccatcacactggcggccgctcgagcatgcatctagagggcccaattcgccctatagtgagtcgtattacaattcactggccgtcgttttacaacgtcgtgactgggaaaaccctggcgttacccaacttaatcgccttgcagcacatccccctttcgccagctggcgtaatagcgaagaggcccgcaccgatcgcccttcccaacagttgcgcagcctgaatggcgaatggacgcgccctgtagcggcgcattaagcgcggcgggtgtggtggttacgcgcagcgtgaccgctacacttgccagcgccctagcgcccgctcctttcgctttcttcccttcctttctcgccacgttcgccggctttccccgtcaagctctaaatcgggggctccctttagggttccgatttagtgctttacggcacctcgaccccaaaaaacttgattagggtgatggttcacgtagtgggccatcgccctgatagacggtttttcgccctttgacgttggagtccacgttctttaatagtggactcttgttccaaactggaacaacactcaaccctatctcggtctattcttttgatttataagggattttgccgatttcggcctattggttaaaaaatgagctgatttaacaaaaatttaacgcgaattttaacaaaattcagggcgcaagggctgctaaaggaagcggaacacgtagaaagccagtccgcagaaacggtgctgaccccggatgaatgtcagctactgggctatctggacaagggaaaacgcaagcgcaaagagaaagcaggtagcttgcagtgggcttacatggcgatagctagactgggcggttttatggacagcaagcgaaccggaattgccagctggggcgccctctggtaaggttgggaagccctgcaaagtaaactggatggctttcttgccgccaaggatctgatggcgcaggggatcaagatctgatcaagagacaggatgaggatcgtttcgcatgattgaacaagatggattgcacgcaggttctccggccgcttgggtggagaggctattcggctatgactgggcacaacagacaatcggctgctctgatgccgccgtgttccggctgtcagcgcaggggcgcccggttctttttgtcaagaccgacctgtccggtgccctgaatgaactgcaggacgaggcagcgcggctatcgtggctggccacgacgggcgttccttgcgcagctgtgctcgacgttgtcactgaagcgggaagggactggctgctattgggcgaagtgccggggcaggatctcctgtcatcccaccttgctcctgccgagaaagtatccatcatggctgatgcaatgcggcggctgcatacgcttgatccggctacctgcccattcgaccaccaagcgaaacatcgcatcgagcgagcacgtactcggatggaagccggtcttgtcgatcaggatgatctggacgaagagcatcaggggctcgcgccagccgaactgttcgccaggctcaaggcgcgcatgcccgacggcgaggatctcgtcgtgacccatggcgatgcctgcttgccgaatatcatggtggaaaatggccgcttttctggattcatcgactgtggccggctgggtgtggcggaccgctatcaggacatagcgttggctacccgtgatattgctgaagagcttggcggcgaatgggctgaccgcttcctcgtgctttacggtatcgccgctcccgattcgcagcgcatcgccttctatcgccttcttgacgagttcttctgaattgaaaaaggaagagtatgagtattcaacatttccgtgtcgcccttattcccttttttgcggcattttgccttcctgtttttgctcacccagaaacgctggtgaaagtaaaagatgctgaagatcagttgggtgcacgagtgggttacatcgaactggatctcaacagcggtaagatccttgagagttttcgccccgaagaacgttttccaatgatgagcacttttaaagttctgctatgtggcgcggtattatcccgtattgacgccgggcaagagcaactcggtcgccgcatacactattctcagaatgacttggttgagtactcaccagtcacagaaaagcatcttacggatggcatgacagtaagagaattatgcagtgctgccataaccatgagtgataacactgcggccaacttacttctgacaacgatcggaggaccgaaggagctaaccgcttttttgcacaacatgggggatcatgtaactcgccttgatcgttgggaaccggagctgaatgaagccataccaaacgacgagcgtgacaccacgatgcctgtagcaatggcaacaacgttgcgcaaactattaactggcgaactacttactctagcttcccggcaacaattaatagactggatggaggcggataaagttgcaggaccacttctgcgctcggcccttccggctggctggtttattgctgataaatctggagccggtgagcgtgggtctcgcggtatcattgcagcactggggccagatggtaagccctcccgtatcgtagttatctacacgacggggagtcaggcaactatggatgaacgaaatagacagatcgctgagataggtgcctcactgattaagcattggtaactgtcagaccaagtttactcatatatactttagattgatttaaaacttcatttttaatttaaaaggatctaggtgaagatcctttttgataatctcatgaccaaaatcccttaacgtgagttttcgttccactgagcgtcagaccccgtagaaaagatcaaaggatcttcttgagatcctttttttctgcgcgtaatctgctgcttgcaaacaaaaaaaccaccgctaccagcggtggtttgtttgccggatcaagagctaccaactctttttccgaaggtaactggcttcagcagagcgcagataccaaatactgttcttctagtgtagccgtagttaggccaccacttcaagaactctgtagcaccgcctacatacctcgctctgctaatcctgttaccagtggctgctgccagtggcgataagtcgtgtcttaccgggttggactcaagacgatagttaccggataaggcgcagcggtcgggctgaacggggggttcgtgcacacagcccagcttggagcgaacgacctacaccgaactgagatacctacagcgtgagctatgagaaagcgccacgcttcccgaagggagaaaggcggacaggtatccggtaagcggcagggtcggaacaggagagcgcacgagggagcttccagggggaaacgcctggtatctttatagtcctgtcgggtttcgccacctctgacttgagcgtcgatttttgtgatgctcgtcaggggggcggagcctatggaaaaacgccagcaacgcggcctttttacggttcctggccttttgctggccttttgctcacatgttctttcctgcgttatcccctgattctgtggataaccgtattaccgcctttgagtgagctgataccgctcgccgcagccgaacgttgtttaattctgtgagcgtatggcaaacg

SEQ ID NO: 26 - DNA, 4931 bp, Artificial Sequence
  pCR-TKLR1
agcgcccaatacgcaaaccgcctctccccgcgcgttggccgattcattaatgcagctggcacgacaggtttcccgactggaaagcgggcagtgagcgcaacgcaattaatgtgagttagctcactcattaggcaccccaggctttacactttatgcttccggctcgtatgttgtgtggaattgtgagcggataacaatttcacacaggaaacagctatgaccatgattacgccaagctttgttacagatggaagggtcaaacttaataaaggatatttgttcgactttgtgattagtttgatgcgattcaaaaaagaatcctctctagctaccaccgcaatagatcctgttagatacatagatcctcgtcgtgatatcgcattttctaacgtgatggatatattaaagtcgaataaagtgaacaataattaattctttattgtcatcatgaacggcggacatattcagttgataatcggccccatgttttcaggtaaaagtacagaattaattagacgagttagacgttatcaaatagctcaatataaatgcgtgactataaaatattctaacgataatagatacggaacgggactatggacgcatgataagaataattttgaagcattggaagcaactaaactatgtgatgtcttggaatcaattacagatttctccgtgataggtatcgatgaaggacagttctttccagacattgtttaattctgtgagcgtatggcaaacggtaccgagctcggatccttctgtgagcgtatggcaaacgaaggaaaaatagttatagtagccgcactcgatgggacatttcaacgtaaaccgtttaataatattttgaatcttattccattatctgaaatggtggtaaaactaactgctgtgtgtatgaaatgctttaaggaggcttccttttctaaacgattgggtgaggaaaccgagatagagataataggaggtaatgatatgtatcaatcggtgtgtagaaagtgttacgtcggctcataatattatattttttatctaaaaaactaaaaataaacattgattaaattttaatataatacttaaaaatggatgttgtgtcgttagataaaccgtttatgtattttgaggaaattgataatgagttagattacgaaccagaaagtgcaaatgaggtcgcaaaaaaactgccgtatcaaggacagttaaaactattactaggagaattattttttcttagtaagttacagcgacacggtatattagatggtgccaccgtagtgtactagttaacggccgccagtgtgctggaattctgcagatatccatcacactggcggccgctcgagcatgcatctagagggcccaattcgccctatagtgagtcgtattacaattcactggccgtcgttttacaacgtcgtgactgggaaaaccctggcgttacccaacttaatcgccttgcagcacatccccctttcgccagctggcgtaatagcgaagaggcccgcaccgatcgcccttcccaacagttgcgcagcctgaatggcgaatggacgcgccctgtagcggcgcattaagcgcggcgggtgtggtggttacgcgcagcgtgaccgctacacttgccagcgccctagcgcccgctcctttcgctttcttcccttcctttctcgccacgttcgccggctttccccgtcaagctctaaatcgggggctccctttagggttccgatttagtgctttacggcacctcgaccccaaaaaacttgattagggtgatggttcacgtagtgggccatcgccctgatagacggtttttcgccctttgacgttggagtccacgttctttaatagtggactcttgttccaaactggaacaacactcaaccctatctcggtctattcttttgatttataagggattttgccgatttcggcctattggttaaaaaatgagctgatttaacaaaaatttaacgcgaattttaacaaaattcagggcgcaagggctgctaaaggaagcggaacacgtagaaagccagtccgcagaaacggtgctgaccccggatgaatgtcagctactgggctatctggacaagggaaaacgcaagcgcaaagagaaagcaggtagcttgcagtgggcttacatggcgatagctagactgggcggttttatggacagcaagcgaaccggaattgccagctggggcgccctctggtaaggttgggaagccctgcaaagtaaactggatggctttcttgccgccaaggatctgatggcgcaggggatcaagatctgatcaagagacaggatgaggatcgtttcgcatgattgaacaagatggattgcacgcaggttctccggccgcttgggtggagaggctattcggctatgactgggcacaacagacaatcggctgctctgatgccgccgtgttccggctgtcagcgcaggggcgcccggttctttttgtcaagaccgacctgtccggtgccctgaatgaactgcaggacgaggcagcgcggctatcgtggctggccacgacgggcgttccttgcgcagctgtgctcgacgttgtcactgaagcgggaagggactggctgctattgggcgaagtgccggggcaggatctcctgtcatcccaccttgctcctgccgagaaagtatccatcatggctgatgcaatgcggcggctgcatacgcttgatccggctacctgcccattcgaccaccaagcgaaacatcgcatcgagcgagcacgtactcggatggaagccggtcttgtcgatcaggatgatctggacgaagagcatcaggggctcgcgccagccgaactgttcgccaggctcaaggcgcgcatgcccgacggcgaggatctcgtcgtgacccatggcgatgcctgcttgccgaatatcatggtggaaaatggccgcttttctggattcatcgactgtggccggctgggtgtggcggaccgctatcaggacatagcgttggctacccgtgatattgctgaagagcttggcggcgaatgggctgaccgcttcctcgtgctttacggtatcgccgctcccgattcgcagcgcatcgccttctatcgccttcttgacgagttcttctgaattgaaaaaggaagagtatgagtattcaacatttccgtgtcgcccttattcccttttttgcggcattttgccttcctgtttttgctcacccagaaacgctggtgaaagtaaaagatgctgaagatcagttgggtgcacgagtgggttacatcgaactggatctcaacagcggtaagatccttgagagttttcgccccgaagaacgttttccaatgatgagcacttttaaagttctgctatgtggcgcggtattatcccgtattgacgccgggcaagagcaactcggtcgccgcatacactattctcagaatgacttggttgagtactcaccagtcacagaaaagcatcttacggatggcatgacagtaagagaattatgcagtgctgccataaccatgagtgataacactgcggccaacttacttctgacaacgatcggaggaccgaaggagctaaccgcttttttgcacaacatgggggatcatgtaactcgccttgatcgttgggaaccggagctgaatgaagccataccaaacgacgagcgtgacaccacgatgcctgtagcaatggcaacaacgttgcgcaaactattaactggcgaactacttactctagcttcccggcaacaattaatagactggatggaggcggataaagttgcaggaccacttctgcgctcggcccttccggctggctggtttattgctgataaatctggagccggtgagcgtgggtctcgcggtatcattgcagcactggggccagatggtaagccctcccgtatcgtagttatctacacgacggggagtcaggcaactatggatgaacgaaatagacagatcgctgagataggtgcctcactgattaagcattggtaactgtcagaccaagtttactcatatatactttagattgatttaaaacttcatttttaatttaaaaggatctaggtgaagatcctttttgataatctcatgaccaaaatcccttaacgtgagttttcgttccactgagcgtcagaccccgtagaaaagatcaaaggatcttcttgagatcctttttttctgcgcgtaatctgctgcttgcaaacaaaaaaaccaccgctaccagcggtggtttgtttgccggatcaagagctaccaactctttttccgaaggtaactggcttcagcagagcgcagataccaaatactgttcttctagtgtagccgtagttaggccaccacttcaagaactctgtagcaccgcctacatacctcgctctgctaatcctgttaccagtggctgctgccagtggcgataagtcgtgtcttaccgggttggactcaagacgatagttaccggataaggcgcagcggtcgggctgaacggggggttcgtgcacacagcccagcttggagcgaacgacctacaccgaactgagatacctacagcgtgagctatgagaaagcgccacgcttcccgaagggagaaaggcggacaggtatccggtaagcggcagggtcggaacaggagagcgcacgagggagcttccagggggaaacgcctggtatctttatagtcctgtcgggtttcgccacctctgacttgagcgtcgatttttgtgatgctcgtcaggggggcggagcctatggaaaaacgccagcaacgcggcctttttacggttcctggccttttgctggccttttgctcacatgttctttcctgcgttatcccctgattctgtggataaccgtattaccgcctttgagtgagctgataccgctcgccgcagccgaacgttgtttaattctgtgagcgtatggcaaacg

SEQ ID NO: 27 - DNA, 20 bp, Artificial Sequence
  Primer gpt5
tcccagtcacgacgttgtaa

SEQ ID NO: 28 - DNA, 20 bp, Artificial Sequence
  Primer gpt3
tgattacgccaagctgatcc

SEQ ID NO: 29 - DNA, 40 bp, Artificial Sequence
  synthetic early/late promoter PSEL
aaaaattgaaattttattttttttttttggaatataaata

SEQ ID NO: 30 - DNA, 7251 bp, Artificial Sequence
  pSC65
agcttttgggatcaataaatggatcacaaccagtatctcttaacgatgttcttcgcagatgatgattcattttttaagtatttggctagtcaagatgatgaatcttcattatctgatatattgcaaatcactcaatatctagactttctgttattattattgatccaatcaaaaaataaattagaagccgtgggtcattgttatgaatctctttcagaggaatacagacaattgacaaaattcacagactttcaagattttaaaaaactgtttaacaaggtccctattgttacagatggaagggtcaaacttaataaaggatatttgttcgactttgtgattagtttgatgcgattcaaaaaagaatcctctctagctaccaccgcaatagatcctgttagatacatagatcctcgtcgcaatatcgcattttctaacgtgatggatatattaaagtcgaataaagtgaacaataattaattctttattgtcatcatgaacggcggacatattcagttgataatcggccccatgttttcaggtaaaagtacagaattaattagacgagttagacgttatcaaatagctcaatataaatgcgtgactataaaatattctaacgataatagatacggaacgggactatggacgcatgataagaataattttgaagcattggaagcaactaaactatgtgatctcttggaatcaattacagatttctccgtgataggtatcgatgaaggacagttctttccagacattgttgaattagatcgataaaaattaattaattacccgggtaccaggcctagatctgtcgacttcgagcttatttatattccaaaaaaaaaaaataaaatttcaatttttaagctttcactaattccaaacccacccgctttttatagtaagtttttcacccataaataataaatacaataattaatttctcgtaaaagtagaaaatatattctaatttattgcacggtaaggaagtagatcataacgcgagcatgggagatcccgtcgttttacaacgtcgtgactgggaaaaccctggcgttacccaacttaatcgccttgcagcacatccccctttcgccagctggcgtaatagcgaagaggcccgcaccgatcgcccttcccaacagttgcgcagcctgaatggcgaatggcgctttgcctggtttccggcaccagaagcggtgccggaaagctggctggagtgcgatcttcctgaggccgatactgtcgtcgtcccctcaaactggcagatgcacggttacgatgcgcccatctacaccaacgtaacctatcccattacggtcaatccgccgtttgttcccacggagaatccgacgggttgttactcgctcacatttaatgttgatgaaagctggctacaggaaggccagacgcgaattatttttgatggcgttaactcggcgtttcatctgtggtgcaacgggcgctgggtcggttacggccaggacagtcgtttgccgtctgaatttgacctgagcgcatttttacgcgccggagaaaaccgcctcgcggtgatggtgctgcgttggagtgacggcagttatctggaagatcaggatatgtggcggatgagcggcattttccgtgacgtctcgtttctgcataaaccgactacacaaatcagcgatttccatgttgccactcgctttaatgatgatttcagccgcgctgtactggaggctgaagttcagatgtgcggcgagttgcgcgactacctacgggtaacagtttctttatggcagggtgaaacgcaggtcgccagcggcaccgcgcctttcggcggtgaaattatcgatgagcgtggtggttatgccgatcgcgtcacactacgtctcaacgtcgaaaacccgaaactgtggagcgccgaaatcccgaatctctatcgtgcggtggttgaactgcacaccgccgacggcacgctgattgaagcagaagcctgcgatgtcggtttccgcgaggtgcggattgaaaatggtctgctgctgctgaacggcaagccgttgctgattcgaggcgttaacctgcacgagcatcatcctctgcatggtcaggtcatggatgagcagacgatggtgcaggatatcctgctgatgaagcagaacaactttaacgccgtgcgctgttcgcattatccgaaccatccgctgtggtacacgctgtgcgaccgctacggcctgtatgtggtggatgaagccaatattgaaacccacggcatggtgccaatgaatcgtctgaccgatgatccgtgctggctaccggcgatgagcgaacgcgtaacgcgaatggtgcagcgcgatcgtaatcacccgagtgtgatcatctggtcgctggggaatgaatcaggccacggcgctaatcacgacgcgctgtatcgctggatcaaatctgtcgatccttcccgcccggtgcagtatgaaggcggcggagccgacaccacggccaccgatattatttgcccgatgtacgcgcgcgtggatgaagaccagcccttcccggctgtgccgaaatggtccatcaaaaaatggctttcgctacctggagagacgcgcccgctgatcctttgcgaatacgcccacgcgatgggtaacagtcttggcggtttcgctaaatactggcaggcgtttcgtcagtatccccgtttacagggcggcttcgtctgggactgggtggatcagtcgctgattaaatatgatgaaaacggcaacccgtggtcggcttacggcggtgattttggcgatacgccgaacgatcgccagttctgtatgaacggtctggtctttgccgaccgcacgccgcatccagcgctgacggaagcaaaacaccagcagcagtttttccagttccgtttatccgggcaaaccatcgaagtgaccagcgaatacctgttccgtcatagcgataacgagctcctgcactggatggtggcgctggatggtaagccgctggcaagcggtgaagtgcctctggatgtcgctccacaaggtaaacagttgattgaactgcctgaactaccgcagccggagagcgccgggcaactctggctcacagtacgcgtagtgcaaccgaacgcgaccgcatggtcagaagccgggcacatcagcgcctggcagcagtggcgtctggcggaaaacctcagtgtgacgctccccgccgcgtcccacgccatcccgcatctgaccaccagcgaaatggatttttgcatcgagctgggtaataagcgttggcaatttaaccgccagtcaggctttctttcacagatgtggattggcgataaaaaacaactgctgacgccgctgcgcgatcagttcacccgtgcaccgctggataacgacattggcgtaagtgaagcgacccgcattgaccctaacgcctgggtcgaacgctggaaggcggcgggccattaccaggccgaagcagcgttgttgcagtgcacggcagatacacttgctgatgcggtgctgattacgaccgctcacgcgtggcagcatcaggggaaaaccttatttatcagccggaaaacctaccggattgatggtagtggtcaaatggcgattaccgttgatgttgaagtggcgagcgatacaccgcatccggcgcggattggcctgaactgccagctggcgcaggtagcagagcgggtaaactggctcggattagggccgcaagaaaactatcccgaccgccttactgccgcctgttttgaccgctgggatctgccattgtcagacatgtataccccgtacgtcttcccgagcgaaaacggtctgcgctgcgggacgcgcgaattgaattatggcccacaccagtggcgcggcgacttccagttcaacatcagccgctacagtcaacagcaactgatggaaaccagccatcgccatctgctgcacgcggaagaaggcacatggctgaatatcgacggtttccatatggggattggtggcgacgactcctggagcccgtcagtatcggcggaattcagctgagcgccggtcgctaccattaccagttggtctggtgtcaaaaataataataaccgggcaggggggatccttctgtgagcgtatggcaaacgaaggaaaaatagttatagtagccgcactcgatgggacatttcaacgtaaaccgtttaataatattttgaatcttattccattatctgaaatggtggtaaaactaactgctgtgtgtatgaaatgctttaaggaggcttccttttctaaacgattgggtgaggaaaccgagatagaaataataggaggtaatgatatgtatcaatcggtgtgtagaaagtgttacatcgactcataatattatattttttatctaaaaaactaaaaataaacattgattaaattttaatataatacttaaaaatggatgttgtgtcgttagataaaccgtttatgtattttgaggaaattgataatgagttagattacgaaccagaaagtgcaaatgaggtcgcaaaaaaactgccgtatcaaggacagttaaaactattactaggagaattattttttcttagtaagttacagcgacacggtatattagatggtgccaccgtagtgtatataggatctgctcccggtacacatatacgttatttgagagatcatttctataatttaggagtgatcatcaaatggatgctaattgacggccgccatcatgatcctattttaaatggattgcgtgatgtgactctagtgactcggttcgttgatgaggaatatctacgatccatcaaaaaacaactgcatccttctaagattattttaatttctgatgtgagatccaaacgaggaggaaatgaacctagtacggcggatttactaagtaattacgctctacaaaatgtcatgattagtattttaaaccccgtggcgtctagtcttaaatggagatgcccgtttccagatcaatggatcaaggacttttatatcccacacggtaataaaatgttacaaccttttgctccttcatattcagctgaaatgagattattaagtatttataccggtgagaacatgagactgactcgggccgcgttgctggcgtttttccataggctccgcccccctgacgagcatcacaaaaatcgacgctcaagtcagaggtggcgaaacccgacaggactataaagataccaggcgtttccccctggaagctccctcgtgcgctctcctgttccgaccctgccgcttaccggatacctgtccgcctttctcccttcgggaagcgtggcgctttctcaatgctcacgctgtaggtatctcagttcggtgtaggtcgttcgctccaagctgggctgtgtgcacgaaccccccgttcagcccgaccgctgcgccttatccggtaactatcgtcttgagtccaacccggtaagacacgacttatcgccactggcagcagccactggtaacaggattagcagagcgaggtatgtaggcggtgctacagagttcttgaagtggtggcctaactacggctacactagaaggacagtatttggtatctgcgctctgctgaagccagttaccttcggaaaaagagttggtagctcttgatccggcaaacaaaccaccgctggtagcggtggtttttttgtttgcaagcagcagattacgcgcagaaaaaaaggatctcaagaagatcctttgatcttttctacggggtctgacgctcagtggaacgaaaactcacgttaagggattttggtcatgagattatcaaaaaggatcttcacctagatccttttaaattaaaaatgaagttttaaatcaatctaaagtatatatgagtaaacttggtctgacagttaccaatgcttaatcagtgaggcacctatctcagcgatctgtctatttcgttcatccatagttgcctgactccccgtcgtgtagataactacgatacgggagggcttaccatctggccccagtgctgcaatgataccgcgagacccacgctcaccggctccagatttatcagcaataaaccagccagccggaagggccgagcgcagaagtggtcctgcaactttatccgcctccatccagtctattaattgttgccgggaagctagagtaagtagttcgccagttaatagtttgcgcaacgtttggtccattgctgcaggcatcgtggtgtcacgctcgtcgtttggtatggcttcattcagctccggttcccaacgatcaaggcgagttacatgatcccccatgttgtgcaaaaaagcggttagctccttcggtcctccgatcgttgtcagaagtaagttggccgcagtgttatcactcatggttatggcagcactgcataattctcttactgtcatgccatccgtaagatgcttttctgtgactggtgagtactcaaccaagtcattctgagaatagtgtatgcggcgaccgagttgctcttgcccggcgtcaacacgggataataccgcgccacatagcagaactttaaaagtgctcatcattggaaaacgttcttcggggcgaaaactctcaaggatcttaccgctgttgagatccagttcgatgtaacccactcgtgcacccaactgatcttcagcatcttttactttcaccagcgtttctgggtgagcaaaaacaggaaggcaaaatgccgcaaaaaagggaataagggcgacacggaaatgttgaatactcatactcttcctttttcaatattattgaagcatttatcagggttattgtctcatgagcggatacatatttgaatgtatttagaaaaataaacaaataggggttccgcgcacatttccccgaaaagtgccacctgacgtctaagaaaccattattatcatgacattaacctataaaaataggcgtatcacgaggccctttcgtcttcgaataaatacctgtgacggaagatcacttcgcagaataaataaatcctggtgtccctgttgataccgggaagccctgggccaacttttggcgaaaatgagacgttgatcggcacgtaagaggttccaactttcaccataatgaaataagatcactaccgggcgtattttttgagttatcgagattttcaggagctaaggaagctaaaatggagaaaaaaatcactggatataccaccgttgatatatcccaatggcatcgtaaagaacattttgaggcatttcagtcagttgctcaatgtacctataaccagaccgttcag

SEQ ID NO: 31 - DNA, 28 bp, Artificial Sequence
  Primer SEL5
tagagctcggtttggaattagtgaaagc

SEQ ID NO: 32 - DNA, 28 bp, Artificial Sequence
  Primer SEL3
tagagctctccagacattgttgaattag

SEQ ID NO: 33 - DNA, 4095 bp, Artificial Sequence
  pCR-SEL4
agcgcccaatacgcaaaccgcctctccccgcgcgttggccgattcattaatgcagctggcacgacaggtttcccgactggaaagcgggcagtgagcgcaacgcaattaatgtgagttagctcactcattaggcaccccaggctttacactttatgcttccggctcgtatgttgtgtggaattgtgagcggataacaatttcacacaggaaacagctatgaccatgattacgccaagcttggtaccgagctctccagacattgttgaattagatcgataaaaattaattaattacccgggtaccaggcctagatctgtcgacttcgagcttatttatattccaaaaaaaaaaaataaaatttcaatttttaagctttcactaattccaaaccgagctcggatccttctgtgagcgtatggcagatggtgccaccgtagtgtactagtaacggccgccagtgtgctgaattctgcagatatccatcacactggcggccgctcgagcatgcatctagagggcccaattcgccctatagtgagtcgtattacaattcactggccgtcgttttacaacgtcgtgactgggaaaaccctggcgttacccaacttaatcgccttgcagcacatccccctttcgccagctggcgtaatagcgaagaggcccgcaccgatcgcccttcccaacagttgcgcagcctgaatggcgaatggacgcgccctgtagcggcgcattaagcgcggcgggtgtggtggttacgcgcagcgtgaccgctacacttgccagcgccctagcgcccgctcctttcgctttcttcccttcctttctcgccacgttcgccggctttccccgtcaagctctaaatcgggggctccctttagggttccgatttagtgctttacggcacctcgaccccaaaaaacttgattagggtgatggttcacgtagtgggccatcgccctgatagacggtttttcgccctttgacgttggagtccacgttctttaatagtggactcttgttccaaactggaacaacactcaaccctatctcggtctattcttttgatttataagggattttgccgatttcggcctattggttaaaaaatgagctgatttaacaaaaatttaacgcgaattttaacaaaattcagggcgcaagggctgctaaaggaagcggaacacgtagaaagccagtccgcagaaacggtgctgaccccggatgaatgtcagctactgggctatctggacaagggaaaacgcaagcgcaaagagaaagcaggtagcttgcagtgggcttacatggcgatagctagactgggcggttttatggacagcaagcgaaccggaattgccagctggggcgccctctggtaaggttgggaagccctgcaaagtaaactggatggctttcttgccgccaaggatctgatggcgcaggggatcaagatctgatcaagagacaggatgaggatcgtttcgcatgattgaacaagatggattgcacgcaggttctccggccgcttgggtggagaggctattcggctatgactgggcacaacagacaatcggctgctctgatgccgccgtgttccggctgtcagcgcaggggcgcccggttctttttgtcaagaccgacctgtccggtgccctgaatgaactgcaggacgaggcagcgcggctatcgtggctggccacgacgggcgttccttgcgcagctgtgctcgacgttgtcactgaagcgggaagggactggctgctattgggcgaagtgccggggcaggatctcctgtcatcccaccttgctcctgccgagaaagtatccatcatggctgatgcaatgcggcggctgcatacgcttgatccggctacctgcccattcgaccaccaagcgaaacatcgcatcgagcgagcacgtactcggatggaagccggtcttgtcgatcaggatgatctggacgaagagcatcaggggctcgcgccagccgaactgttcgccaggctcaaggcgcgcatgcccgacggcgaggatctcgtcgtgacccatggcgatgcctgcttgccgaatatcatggtggaaaatggccgcttttctggattcatcgactgtggccggctgggtgtggcggaccgctatcaggacatagcgttggctacccgtgatattgctgaagagcttggcggcgaatgggctgaccgcttcctcgtgctttacggtatcgccgctcccgattcgcagcgcatcgccttctatcgccttcttgacgagttcttctgaattgaaaaaggaagagtatgagtattcaacatttccgtgtcgcccttattcccttttttgcggcattttgccttcctgtttttgctcacccagaaacgctggtgaaagtaaaagatgctgaagatcagttgggtgcacgagtgggttacatcgaactggatctcaacagcggtaagatccttgagagttttcgccccgaagaacgttttccaatgatgagcacttttaaagttctgctatgtggcgcggtattatcccgtattgacgccgggcaagagcaactcggtcgccgcatacactattctcagaatgacttggttgagtactcaccagtcacagaaaagcatcttacggatggcatgacagtaagagaattatgcagtgctgccataaccatgagtgataacactgcggccaacttacttctgacaacgatcggaggaccgaaggagctaaccgcttttttgcacaacatgggggatcatgtaactcgccttgatcgttgggaaccggagctgaatgaagccataccaaacgacgagcgtgacaccacgatgcctgtagcaatggcaacaacgttgcgcaaactattaactggcgaactacttactctagcttcccggcaacaattaatagactggatggaggcggataaagttgcaggaccacttctgcgctcggcccttccggctggctggtttattgctgataaatctggagccggtgagcgtgggtctcgcggtatcattgcagcactggggccagatggtaagccctcccgtatcgtagttatctacacgacggggagtcaggcaactatggatgaacgaaatagacagatcgctgagataggtgcctcactgattaagcattggtaactgtcagaccaagtttactcatatatactttagattgatttaaaacttcatttttaatttaaaaggatctaggtgaagatcctttttgataatctcatgaccaaaatcccttaacgtgagttttcgttccactgagcgtcagaccccgtagaaaagatcaaaggatcttcttgagatcctttttttctgcgcgtaatctgctgcttgcaaacaaaaaaaccaccgctaccagcggtggtttgtttgccggatcaagagctaccaactctttttccgaaggtaactggcttcagcagagcgcagataccaaatactgttcttctagtgtagccgtagttaggccaccacttcaagaactctgtagcaccgcctacatacctcgctctgctaatcctgttaccagtggctgctgccagtggcgataagtcgtgtcttaccgggttggactcaagacgatagttaccggataaggcgcagcggtcgggctgaacggggggttcgtgcacacagcccagcttggagcgaacgacctacaccgaactgagatacctacagcgtgagctatgagaaagcgccacgcttcccgaagggagaaaggcggacaggtatccggtaagcggcagggtcggaacaggagagcgcacgagggagcttccagggggaaacgcctggtatctttatagtcctgtcgggtttcgccacctctgacttgagcgtcgatttttgtgatgctcgtcaggggggcggagcctatggaaaaacgccagcaacgcggcctttttacggttcctggccttttgctggccttttgctcacatgttctttcctgcgttatcccctgattctgtggataaccgtattaccgcctttgagtgagctgataccgctcgccgcagccgaacgaccgagcgcagcgagtcagtgagcgaggaagcggaag

SEQ ID NO: 34 - DNA, 62 bp, Artificial Sequence
  Primer SE5
tagagctcaaaaattgaaaaactagcgtctttttttgctcgaagtcgacagatctaggcctg

SEQ ID NO: 35 - DNA, 34 bp, Artificial Sequence
  Chemically synthesized vaccinia synthetic early promoter
aaaaattgaaaaactagcgtctttttttgctcga

SEQ ID NO: 36 - DNA, 4061 bp, Artificial Sequence
  pCR-SE1
agcgcccaatacgcaaaccgcctctccccgcgcgttggccgattcattaatgcagctggcacgacaggtttcccgactggaaagcgggcagtgagcgcaacgcaattaatgtgagttagctcactcattaggcaccccaggctttacactttatgcttccggctcgtatgttgtgtggaattgtgagcggataacaatttcacacaggaaacagctatgaccatgattacgccaagcttggtaccgagctctccagacattgttgaattagatcgataaaaattaattaattacccgggtaccaggcctagatctgtcgacttcgagcaaaaaaagacgctagtttttcaatttttgagctcggatccttctgtgagcgtatggcagatggtgccaccgtagtgtactagtaacggccgccagtgtgctggaattctgcagatatccatcacactggcggccgctcgagcatgcatctagagggcccaattcgccctatagtgagtcgtattacaattcactggccgtcgttttacaacgtcgtgactgggaaaaccctggcgttacccaacttaatcgccttgcagcacatccccctttcgccagctggcgtaatagcgaagaggcccgcaccgatcgcccttcccaacagttgcgcagcctgaatggcgaatggacgcgccctgtagcggcgcattaagcgcggcgggtgtggtggttacgcgcagcgtgaccgctacacttgccagcgccctagcgcccgctcctttcgctttcttcccttcctttctcgccacgttcgccggctttccccgtcaagctctaaatcgggggctccctttagggttccgatttagtgctttacggcacctcgaccccaaaaaacttgattagggtgatggttcacgtagtgggccatcgccctgatagacggtttttcgccctttgacgttggagtccacgttctttaatagtggactcttgttccaaactggaacaacactcaaccctatctcggtctattcttttgatttataagggattttgccgatttcggcctattggttaaaaaatgagctgatttaacaaaaatttaacgcgaattttaacaaaattcagggcgcaagggctgctaaaggaagcggaacacgtagaaagccagtccgcagaaacggtgctgaccccggatgaatgtcagctactgggctatctggacaagggaaaacgcaagcgcaaagagaaagcaggtagcttgcagtgggcttacatggcgatagctagactgggcggttttatggacagcaagcgaaccggaattgccagctggggcgccctctggtaaggttgggaagccctgcaaagtaaactggatggctttcttgccgccaaggatctgatggcgcaggggatcaagatctgatcaagagacaggatgaggatcgtttcgcatgattgaacaagatggattgcacgcaggttctccggccgcttgggtggagaggctattcggctatgactgggcacaacagacaatcggctgctctgatgccgccgtgttccggctgtcagcgcaggggcgcccggttctttttgtcaagaccgacctgtccggtgccctgaatgaactgcaggacgaggcagcgcggctatcgtggctggccacgacgggcgttccttgcgcagctgtgctcgacgttgtcactgaagcgggaagggactggctgctattgggcgaagtgccggggcaggatctcctgtcatcccaccttgctcctgccgagaaagtatccatcatggctgatgcaatgcggcggctgcatacgcttgatccggctacctgcccattcgaccaccaagcgaaacatcgcatcgagcgagcacgtactcggatggaagccggtcttgtcgatcaggatgatctggacgaagagcatcaggggctcgcgccagccgaactgttcgccaggctcaaggcgcgcatgcccgacggcgaggatctcgtcgtgacccatggcgatgcctgcttgccgaatatcatggtggaaaatggccgcttttctggattcatcgactgtggccggctgggtgtggcggaccgctatcaggacatagcgttggctacccgtgatattgctgaagagcttggcggcgaatgggctgaccgcttcctcgtgctttacggtatcgccgctcccgattcgcagcgcatcgccttctatcgccttcttgacgagttcttctgaattgaaaaaggaagagtatgagtattcaacatttccgtgtcgcccttattcccttttttgcggcattttgccttcctgtttttgctcacccagaaacgctggtgaaagtaaaagatgctgaagatcagttgggtgcacgagtgggttacatcgaactggatctcaacagcggtaagatccttgagagttttcgccccgaagaacgttttccaatgatgagcacttttaaagttctgctatgtggcgcggtattatcccgtattgacgccgggcaagagcaactcggtcgccgcatacactattctcagaatgacttggttgagtactcaccagtcacagaaaagcatcttacggatggcatgacagtaagagaattatgcagtgctgccataaccatgagtgataacactgcggccaacttacttctgacaacgatcggaggaccgaaggagctaaccgcttttttgcacaacatgggggatcatgtaactcgccttgatcgttgggaaccggagctgaatgaagccataccaaacgacgagcgtgacaccacgatgcctgtagcaatggcaacaacgttgcgcaaactattaactggcgaactacttactctagcttcccggcaacaattaatagactggatggaggcggataaagttgcaggaccacttctgcgctcggcccttccggctggctggtttattgctgataaatctggagccggtgagcgtgggtctcgcggtatcattgcagcactggggccagatggtaagccctcccgtatcgtagttatctacacgacggggagtcaggcaactatggatgaacgaaatagacagatcgctgagataggtgcctcactgattaagcattggtaactgtcagaccaagtttactcatatatactttagattgatttaaaacttcatttttaatttaaaaggatctaggtgaagatcctttttgataatctcatgaccaaaatcccttaacgtgagttttcgttccactgagcgtcagaccccgtagaaaagatcaaaggatcttcttgagatcctttttttctgcgcgtaatctgctgcttgcaaacaaaaaaaccaccgctaccagcggtggtttgtttgccggatcaagagctaccaactctttttccgaaggtaactggcttcagcagagcgcagataccaaatactgttcttctagtgtagccgtagttaggccaccacttcaagaactctgtagcaccgcctacatacctcgctctgctaatcctgttaccagtggctgctgccagtggcgataagtcgtgtcttaccgggttggactcaagacgatagttaccggataaggcgcagcggtcgggctgaacggggggttcgtgcacacagcccagcttggagcgaacgacctacaccgaactgagatacctacagcgtgagctatgagaaagcgccacgcttcccgaagggagaaaggcggacaggtatccggtaagcggcagggtcggaacaggagagcgcacgagggagcttccagggggaaacgcctggtatctttatagtcctgtcgggtttcgccacctctgacttgagcgtcgatttttgtgatgctcgtcaggggggcggagcctatggaaaaacgccagcaacgcggcctttttacggttcctggccttttgctggccttttgctcacatgttctttcctgcgttatcccctgattctgtggataaccgtattaccgcctttgagtgagctgataccgctcgccgcagccgaacgaccgagcgcagcgagtcagtgagcgaggaagcggaag

SEQ ID NO: 37 - DNA, 60 bp, Artificial Sequence
  Primer SL5
tagagctcttttttttttttttttttttggcatataaataagtcgacagatctaggcctg

SEQ ID NO: 38 - DNA, 32 bp, Artificial Sequence
  synthetic late promoter PSL
ttttttttttttttttttttggcatataaata

SEQ ID NO: 39 - DNA, 4059 bp, Artificial Sequence
  pCR-SL3
agcgcccaatacgcaaaccgcctctccccgcgcgttggccgattcattaatgcagctggcacgacaggtttcccgactggaaagcgggcagtgagcgcaacgcaattaatgtgagttagctcactcattaggcaccccaggctttacactttatgcttccggctcgtatgttgtgtggaattgtgagcggataacaatttcacacaggaaacagctatgaccatgattacgccaagcttggtaccgagctctccagacattgttgaattagatcgataaaaattaattaattacccgggtaccaggcctagatctgtcgacttatttatatgccaaaaaaaaaaaaaaaaaaaagagctcggatccttctgtgagcgtatggcagatggtgccaccgtagtgtactagtaacggccgccagtgtgctggaattctgcagatatccatcacactggcggccgctcgagcatgcatctagagggcccaattcgccctatagtgagtcgtattacaattcactggccgtcgttttacaacgtcgtgactgggaaaaccctggcgttacccaacttaatcgccttgcagcacatccccctttcgccagctggcgtaatagcgaagaggcccgcaccgatcgcccttcccaacagttgcgcagcctgaatggcgaatggacgcgccctgtagcggcgcattaagcgcggcgggtgtggtggttacgcgcagcgtgaccgctacacttgccagcgccctagcgcccgctcctttcgctttcttcccttcctttctcgccacgttcgccggctttccccgtcaagctctaaatcgggggctccctttagggttccgatttagtgctttacggcacctcgaccccaaaaaacttgattagggtgatggttcacgtagtgggccatcgccctgatagacggtttttcgccctttgacgttggagtccacgttctttaatagtggactcttgttccaaactggaacaacactcaaccctatctcggtctattcttttgatttataagggattttgccgatttcggcctattggttaaaaaatgagctgatttaacaaaaatttaacgcgaattttaacaaaattcagggcgcaagggctgctaaaggaagcggaacacgtagaaagccagtccgcagaaacggtgctgaccccggatgaatgtcagctactgggctatctggacaagggaaaacgcaagcgcaaagagaaagcaggtagcttgcagtgggcttacatggcgatagctagactgggcggttttatggacagcaagcgaaccggaattgccagctggggcgccctctggtaaggttgggaagccctgcaaagtaaactggatggctttcttgccgccaaggatctgatggcgcaggggatcaagatctgatcaagagacaggatgaggatcgtttcgcatgattgaacaagatggattgcacgcaggttctccggccgcttgggtggagaggctattcggctatgactgggcacaacagacaatcggctgctctgatgccgccgtgttccggctgtcagcgcaggggcgcccggttctttttgtcaagaccgacctgtccggtgccctgaatgaactgcaggacgaggcagcgcggctatcgtggctggccacgacgggcgttccttgcgcagctgtgctcgacgttgtcactgaagcgggaagggactggctgctattgggcgaagtgccggggcaggatctcctgtcatcccaccttgctcctgccgagaaagtatccatcatggctgatgcaatgcggcggctgcatacgcttgatccggctacctgcccattcgaccaccaagcgaaacatcgcatcgagcgagcacgtactcggatggaagccggtcttgtcgatcaggatgatctggacgaagagcatcaggggctcgcgccagccgaactgttcgccaggctcaaggcgcgcatgcccgacggcgaggatctcgtcgtgacccatggcgatgcctgcttgccgaatatcatggtggaaaatggccgcttttctggattcatcgactgtggccggctgggtgtggcggaccgctatcaggacatagcgttggctacccgtgatattgctgaagagcttggcggcgaatgggctgaccgcttcctcgtgctttacggtatcgccgctcccgattcgcagcgcatcgccttctatcgccttcttgacgagttcttctgaattgaaaaaggaagagtatgagtattcaacatttccgtgtcgcccttattcccttttttgcggcattttgccttcctgtttttgctcacccagaaacgctggtgaaagtaaaagatgctgaagatcagttgggtgcacgagtgggttacatcgaactggatctcaacagcggtaagatccttgagagttttcgccccgaagaacgttttccaatgatgagcacttttaaagttctgctatgtggcgcggtattatcccgtattgacgccgggcaagagcaactcggtcgccgcatacactattctcagaatgacttggttgagtactcaccagtcacagaaaagcatcttacggatggcatgacagtaagagaattatgcagtgctgccataaccatgagtgataacactgcggccaacttacttctgacaacgatcggaggaccgaaggagctaaccgcttttttgcacaacatgggggatcatgtaactcgccttgatcgttgggaaccggagctgaatgaagccataccaaacgacgagcgtgacaccacgatgcctgtagcaatggcaacaacgttgcgcaaactattaactggcgaactacttactctagcttcccggcaacaattaatagactggatggaggcggataaagttgcaggaccacttctgcgctcggcccttccggctggctggtttattgctgataaatctggagccggtgagcgtgggtctcgcggtatcattgcagcactggggccagatggtaagccctcccgtatcgtagttatctacacgacggggagtcaggcaactatggatgaacgaaatagacagatcgctgagataggtgcctcactgattaagcattggtaactgtcagaccaagtttactcatatatactttagattgatttaaaacttcatttttaatttaaaaggatctaggtgaagatcctttttgataatctcatgaccaaaatcccttaacgtgagttttcgttccactgagcgtcagaccccgtagaaaagatcaaaggatcttcttgagatcctttttttctgcgcgtaatctgctgcttgcaaacaaaaaaaccaccgctaccagcggtggtttgtttgccggatcaagagctaccaactctttttccgaaggtaactggcttcagcagagcgcagataccaaatactgttcttctagtgtagccgtagttaggccaccacttcaagaactctgtagcaccgcctacatacctcgctctgctaatcctgttaccagtggctgctgccagtggcgataagtcgtgtcttaccgggttggactcaagacgatagttaccggataaggcgcagcggtcgggctgaacggggggttcgtgcacacagcccagcttggagcgaacgacctacaccgaactgagatacctacagcgtgagctatgagaaagcgccacgcttcccgaagggagaaaggcggacaggtatccggtaagcggcagggtcggaacaggagagcgcacgagggagcttccagggggaaacgcctggtatctttatagtcctgtcgggtttcgccacctctgacttgagcgtcgatttttgtgatgctcgtcaggggggcggagcctatggaaaaacgccagcaacgcggcctttttacggttcctggccttttgctggccttttgctcacatgttctttcctgcgttatcccctgattctgtggataaccgtattaccgcctttgagtgagctgataccgctcgccgcagccgaacgaccgagcgcagcgagtcagtgagcgaggaagcggaag

SEQ ID NO: 40 - DNA, 3519 bp, Artificial Sequence
  pCR-Blunt II-TOPO
agcgcccaatacgcaaaccgcctctccccgcgcgttggccgattcattaatgcagctggcacgacaggtttcccgactggaaagcgggcagtgagcgcaacgcaattaatgtgagttagctcactcattaggcaccccaggctttacactttatgcttccggctcgtatgttgtgtggaattgtgagcggataacaatttcacacaggaaacagctatgaccatgattacgccaagctatttaggtgacactatagaatactcaagctatgcatcaagcttggtaccgagctcggatccactagtaacggccgccagtgtgctggaattcgcccttaagggcgaattctgcagatatccatcacactggcggccgctcgagcatgcatctagagggcccaattcgccctatagtgagtcgtattacaattcactggccgtcgttttacaacgtcgtgactgggaaaaccctggcgttacccaacttaatcgccttgcagcacatccccctttcgccagctggcgtaatagcgaagaggcccgcaccgatcgcccttcccaacagttgcgcagcctatacgtacggcagtttaaggtttacacctataaaagagagagccgttatcgtctgtttgtggatgtacagagtgatattattgacacgccggggcgacggatggtgatccccctggccagtgcacgtctgctgtcagataaagtctcccgtgaactttacccggtggtgcatatcggggatgaaagctggcgcatgatgaccaccgatatggccagtgtgccggtctccgttatcggggaagaagtggctgatctcagccaccgcgaaaatgacatcaaaaacgccattaacctgatgttctggggaatataaatgtcaggcatgagattatcaaaaaggatcttcacctagatccttttcacgtagaaagccagtccgcagaaacggtgctgaccccggatgaatgtcagctactgggctatctggacaagggaaaacgcaagcgcaaagagaaagcaggtagcttgcagtgggcttacatggcgatagctagactgggcggttttatggacagcaagcgaaccggaattgccagctggggcgccctctggtaaggttgggaagccctgcaaagtaaactggatggctttctcgccgccaaggatctgatggcgcaggggatcaagctctgatcaagagacaggatgaggatcgtttcgcatgattgaacaagatggattgcacgcaggttctccggccgcttgggtggagaggctattcggctatgactgggcacaacagacaatcggctgctctgatgccgccgtgttccggctgtcagcgcaggggcgcccggttctttttgtcaagaccgacctgtccggtgccctgaatgaactgcaagacgaggcagcgcggctatcgtggctggccacgacgggcgttccttgcgcagctgtgctcgacgttgtcactgaagcgggaagggactggctgctattgggcgaagtgccggggcaggatctcctgtcatctcaccttgctcctgccgagaaagtatccatcatggctgatgcaatgcggcggctgcatacgcttgatccggctacctgcccattcgaccaccaagcgaaacatcgcatcgagcgagcacgtactcggatggaagccggtcttgtcgatcaggatgatctggacgaagagcatcaggggctcgcgccagccgaactgttcgccaggctcaaggcgagcatgcccgacggcgaggatctcgtcgtgacccatggcgatgcctgcttgccgaatatcatggtggaaaatggccgcttttctggattcatcgactgtggccggctgggtgtggcggaccgctatcaggacatagcgttggctacccgtgatattgctgaagagcttggcggcgaatgggctgaccgcttcctcgtgctttacggtatcgccgctcccgattcgcagcgcatcgccttctatcgccttcttgacgagttcttctgaattattaacgcttacaatttcctgatgcggtattttctccttacgcatctgtgcggtatttcacaccgcatacaggtggcacttttcggggaaatgtgcgcggaacccctatttgtttatttttctaaatacattcaaatatgtatccgctcatgagacaataaccctgataaatgcttcaataatagcacgtgaggagggccaccatggccaagttgaccagtgccgttccggtgctcaccgcgcgcgacgtcgccggagcggtcgagttctggaccgaccggctcgggttctcccgggacttcgtggaggacgacttcgccggtgtggtccgggacgacgtgaccctgttcatcagcgcggtccaggaccaggtggtgccggacaacaccctggcctgggtgtgggtgcgcggcctggacgagctgtacgccgagtggtcggaggtcgtgtccacgaacttccgggacgcctccgggccggccatgaccgagatcggcgagcagccgtgggggcgggagttcgccctgcgcgacccggccggcaactgcgtgcacttcgtggccgaggagcaggactgacacgtgctaaaacttcatttttaatttaaaaggatctaggtgaagatcctttttgataatctcatgaccaaaatcccttaacgtgagttttcgttccactgagcgtcagaccccgtagaaaagatcaaaggatcttcttgagatcctttttttctgcgcgtaatctgctgcttgcaaacaaaaaaaccaccgctaccagcggtggtttgtttgccggatcaagagctaccaactctttttccgaaggtaactggcttcagcagagcgcagataccaaatactgtccttctagtgtagccgtagttaggccaccacttcaagaactctgtagcaccgcctacatacctcgctctgctaatcctgttaccagtggctgctgccagtggcgataagtcgtgtcttaccgggttggactcaagacgatagttaccggataaggcgcagcggtcgggctgaacggggggttcgtgcacacagcccagcttggagcgaacgacctacaccgaactgagatacctacagcgtgagctatgagaaagcgccacgcttcccgaagggagaaaggcggacaggtatccggtaagcggcagggtcggaacaggagagcgcacgagggagcttccagggggaaacgcctggtatctttatagtcctgtcgggtttcgccacctctgacttgagcgtcgatttttgtgatgctcgtcaggggggcggagcctatggaaaaacgccagcaacgcggcctttttacggttcctgggcttttgctggccttttgctcacatgttctttcctgcgttatcccctgattctgtggataaccgtattaccgcctttgagtgagctgataccgctcgccgcagccgaacgaccgagcgcagcgagtcagtgagcgaggaagcggaag

SEQ ID NO: 41 - DNA, 4222 bp, Artificial Sequence
  pNCVVhaT-SSEL-hk5
gacgtctaagaaaccattattatcatgacattaacctataaaaataggcgtatcacgaggccctttcgtctcgcgcgtttcggtgatgacggtgaaaacctctgacacatgcagctcccggagacggtcacagcttgtctgtaagcggatgccgggagcagacaagcccgtcagggcgcgtcagcgggtgttggcgggtgtcggggctggcttaactatgcggcatcagagcagattgtactgagagtgcaccatatgacacgattaccaatacttttgttactaatatcattagtatacgctacaccttttcctcagacatctaaaaaaataggtgatgatgcaactctatcatgtaatcgaaataatacaaatgactacgttgttatgagtgcttggtataaggagcccaattccattattcttttagctgctaaaagcgacgtcttgtattttgataattataccaaggataaaatatcttacgactctccatacgatgatctagttacaactatcacaattaaatcattgactgctaaagatgccggtacttatgtatgtgcattctttatgacatcgcctacaaatgacactgataaagtagattatgaagaatactccacagagttgattgtaaatacagatagtgaatcgactatagacataatactatctggatctacacattcaccggaaactagttctgagaaacctgattatatagataattctaattgctcgtcggtattcgaaatctaaaaattgaaattttattttttttttttggaatataaataagcttaccatgtacaggatgcaactcctgtcttgcattgcactaagtcttgcacttgtcacgaattcgcctgttgtcctgcttccagatgtagagactccttccgaagaagactgtatgtttgggaatgggaaaggataccgaggcaagagggcgaccactgttactgggacgccatgccaggactgggctgcccaggagccccatagacacagcattttcactccagagacaaatccacgggcgggtctggaaaaaaattactgccgtaaccctgatggtgatgtaggtggtccctggtgctacacgacaaatccaagaaaactttacgactactgtgatgtccctcagtgtgcggccccttcatttgattagtttttctggatccgactccggaaccaattactgataaagaagaagatcatacagtcacagacactgtctcatacactacagtaagtacatcatctggaattgtcactactaaatcaaccaccgatgatacgtacaatgataatgatacagtaccatcaactactgtaggcggtagtacaacctctattagcaattataaaaccaaggactttgtagaaatatttggtattaccgcattaattatattgtcggccgtggcaatattctgtattacgtattatatatgtaataaacgttcacgtaaatacaaaacagagaacaaagtctagatttttgacttacataaatgtctgggatagtaaaatctatcagaattctagaaaagtagaaaatatattctaatttattgcacgggatgagcgaaaaatacatcgtcacctgggacatgttgcagatccatgcacgtaaactcgcaagccgactgatgccttctgaacaatggaaaggcattattgccgtaagccgtggcggtctggtaccgggtgcgttactggcgcgtgaactgggtattcgtcatgtcgataccgtttgtatttccagctacgatcacgacaaccagcgcgagcttaaagtgctgaaacgcgcagaaggcgatggcgaaggcttcatcgttattgatgacctggtggataccggtggtactgcggttgcgattcgtgaaatgtatccaaaagcgcactttgtcaccatcttcgcaaaaccggctggtcgtccgctggttgatgactatgttgttgatatcccgcaagatacctggattgaacagccgtgggatatgggcgtcgtattcgtcccgccaatctccggtcgctaaggatcagcttggcgtaatcatggtcatagctgtttcctgtgtgaaattgttatccgctcacaattccacacaacatacgagccggaagcataaagtgtaaagcctggggtgcctaatgagtgagctaactcacattaattgcgttgcgctcactgcccgctttccagtcgggaaacctgtcgtgccagctgcattaatgaatcggccaacgcgcggggagaggcggtttgcgtattgggcgctcttccgcttcctcgctcactgactcgctgcgctcggtcgttcggctgcggcgagcggtatcagctcactcaaaggcggtaatacggttatccacagaatcaggggataacgcaggaaagaacatgtgagcaaaaggccagcaaaaggccaggaaccgtaaaaaggccgcgttgctggcgtttttccataggctccgcccccctgacgagcatcacaaaaatcgacgctcaagtcagaggtggcgaaacccgacaggactataaagataccaggcgtttccccctggaagctccctcgtgcgctctcctgttccgaccctgccgcttaccggatacctgtccgcctttctcccttcgggaagcgtggcgctttctcatagctcacgctgtaggtatctcagttcggtgtaggtcgttcgctccaagctgggctgtgtgcacgaaccccccgttcagcccgaccgctgcgccttatccggtaactatcgtcttgagtccaacccggtaagacacgacttatcgccactggcagcagccactggtaacaggattagcagagcgaggtatgtaggcggtgctacagagttcttgaagtggtggcctaactacggctacactagaaggacagtatttggtatctgcgctctgctgaagccagttaccttcggaaaaagagttggtagctcttgatccggcaaacaaaccaccgctggtagcggtggtttttttgtttgcaagcagcagattacgcgcagaaaaaaaggatctcaagaagatcctttgatcttttctacggggtctgacgctcagtggaacgaaaactcacgttaagggattttggtcatgagattatcaaaaaggatcttcacctagatccttttaaattaaaaatgaagttttaaatcaatctaaagtatatatgagtaaacttggtctgacagttaccaatgcttaatcagtgaggcacctatctcagcgatctgtctatttcgttcatccatagttgcctgactccccgtcgtgtagataactacgatacgggagggcttaccatctggccccagtgctgcaatgataccgcgagacccacgctcaccggctccagatttatcagcaataaaccagccagccggaagggccgagcgcagaagtggtcctgcaactttatccgcctccatccagtctattaattgttgccgggaagctagagtaagtagttcgccagttaatagtttgcgcaacgttgttgccattgctacaggcatcgtggtgtcacgctcgtcgtttggtatggcttcattcagctccggttcccaacgatcaaggcgagttacatgatcccccatgttgtgcaaaaaagcggttagctccttcggtcctccgatcgttgtcagaagtaagttggccgcagtgttatcactcatggttatggcagcactgcataattctcttactgtcatgccatccgtaagatgcttttctgtgactggtgagtactcaaccaagtcattctgagaatagtgtatgcggcgaccgagttgctcttgcccggcgtcaatacgggataataccgcgccacatagcagaactttaaaagtgctcatcattggaaaacgttcttcggggcgaaaactctcaaggatcttaccgctgttgagatccagttcgatgtaacccactcgtgcacccaactgatcttcagcatcttttactttcaccagcgtttctgggtgagcaaaaacaggaaggcaaaatgccgcaaaaaagggaataagggcgacacggaaatgttgaatactcatactcttcctttttcaatattattgaagcatttatcagggttattgtctcatgagcggatacatatttgaatgtatttagaaaaataaacaaataggggttccgcgcacatttccccgaaaagtgccacct

SEQ ID NO: 42 - DNA, 366 bp, Homo sapiens
  DNA encoding the human plasminogen kringle 5 domain
atgtacaggatgcaactcctgtcttgcattgcactaagtcttgcacttgtcacgaattcgcctgttgtcctgcttccagatgtagagactccttccgaagaagactgtatgtttgggaatgggaaaggataccgaggcaagagggcgaccactgttactgggacgccatgccaggactgggctgcccaggagccccatagacacagcattttcactccagagacaaatccacgggcgggtctggaaaaaaattactgccgtaaccctgatggtgatgtaggtggtccctggtgctacacgacaaatccaagaaaactttacgactactgtgatgtccctcagtgtgcggccccttcatttgattag

SEQ ID NO: 43 - DNA, 4682 bp, Artificial Sequence
  pBLAST-hKringle5
ggatctgcgatcgctccggtgcccgtcagtgggcagagcgcacatcgcccacagtccccgagaagttggggggaggggtcggcaattgaaccggtgcctagagaaggtggcgcggggtaaactgggaaagtgatgtcgtgtactggctccgcctttttcccgagggtgggggagaaccgtatataagtgcagtagtcgccgtgaacgttctttttcgcaacgggtttgccgccagaacacagctgaagcttcgaggggctcgcatctctccttcacgcgcccgccgccctacctgaggccgccatccacgccggttgagtcgcgttctgccgcctcccgcctgtggtgcctcctgaactgcgtccgccgtctaggtaagtttaaagctcaggtcgagaccgggcctttgtccggcgctcccttggagcctacctagactcagccggctctccacgctttgcctgaccctgcttgctcaactctacgtctttgtttcgttttctgttctgcgccgttacagatccaagctgtgaccggcgcctacgtaagtgatatctactagatttatcaaaaagagtgttgacttgtgagcgctcacaattgatacttagattcatcgagagggacacgtcgactactaaccttcttctctttcctacagctgagatcaccggcgaaggagggccaccatgtacaggatgcaactcctgtcttgcattgcactaagtcttgcacttgtcacgaattcgcctgttgtcctgcttccagatgtagagactccttccgaagaagactgtatgtttgggaatgggaaaggataccgaggcaagagggcgaccactgttactgggacgccatgccaggactgggctgcccaggagccccatagacacagcattttcactccagagacaaatccacgggcgggtctggaaaaaaattactgccgtaaccctgatggtgatgtaggtggtccctggtgctacacgacaaatccaagaaaactttacgactactgtgatgtccctcagtgtgcggccccttcatttgattagctagctcgacatgataagatacattgatgagtttggacaaaccacaactagaatgcagtgaaaaaaatgctttatttgtgaaatttgtgatgctattgctttatttgtgaaatttgtgatgctattgctttatttgtaaccattataagctgcaataaacaagttaacaacaacaattgcattcattttatgtttcaggttcagggggaggtgtgggaggttttttaaagcaagtaaaacctctacaaatgtggtagatcatttaaatgttaattaagaacatgtgagcaaaaggccagcaaaaggccaggaaccgtaaaaaggccgcgttgctggcgtttttccataggctccgcccccctgacgagcatcacaaaaatcgacgctcaagtcagaggtggcgaaacccgacaggactataaagataccaggcgtttccccctggaagctccctcgtgcgctctcctgttccgaccctgccgcttaccggatacctgtccgcctttctcccttcgggaagcgtggcgctttctcaatgctcacgctgtaggtatctcagttcggtgtaggtcgttcgctccaagctgggctgtgtgcacgaaccccccgttcagcccgaccgctgcgccttatccggtaactatcgtcttgagtccaacccggtaagacacgacttatcgccactggcagcagccactggtaacaggattagcagagcgaggtatgtaggcggtgctacagagttcttgaagtggtggcctaactacggctacactagaagaacagtatttggtatctgcgctctgctgaagccagttaccttcggaaaaagagttggtagctcttgatccggcaaacaaaccaccgctggtagcggtggtttttttgtttgcaagcagcagattacgcgcagaaaaaaaggatctcaagaagatcctttgatcttttctacggggtctgacgctcagtggaacgaaaactcacgttaagggattttggtcatggctagttaattaagctgcaataaacaatcattattttcattggatctgtgtgttggttttttgtgtgggcttgggggagggggaggccagaatgactccaagagctacaggaaggcaggtcagagaccccactggacaaacagtggctggactctgcaccataacacacaatcaacaggggagtgagctggatcgagctagagtccgttacataacttacggtaaatggcccgcctggctgaccgcccaacgacccccgcccattgacgtcaataatgacgtatgttcccatagtaacgccaatagggactttccattgacgtcaatgggtggagtatttacggtaaactgcccacttggcagtacatcaagtgtatcatatgccaagtacgccccctattgacgtcaatgacggtaaatggcccgcctggcattatgcccagtacatgaccttatgggactttcctacttggcagtacatctacgtattagtcatcgctattaccatggtgatgcggttttggcagtacatcaatgggcgtggatagcggtttgactcacggggatttccaagtctccaccccattgacgtcaatgggagtttgttttggcaccaaaatcaacgggactttccaaaatgtcgtaacaactccgccccattgacgcaaatgggcggtaggcgtgtacggtgggaggtctatataagcagagctcgtttagtgaaccgtcagatcgcctggagacgccatccacgctgttttgacctccatagaagacaccgggaccgatccagcctccgcggccgggaacggtgcattggaacgcggattccccgtgccaagagtgacgtaagtaccgcctatagagtctataggcccacccccttggcttcttatgcatgctatactgtttttggcttggggtctatacacccccgcttcctcatgttataggtgatggtatagcttagcctataggtgtgggttattgaccattattgaccactcccctattggtgacgatactttccattactaatccataacatggctctttgccacaactctctttattggctatatgccaatacactgtccttcagagactgacacggactctgtatttttacaggatggggtctcatttattatttacaaattcacatatacaacaccaccgtccccagtgcccgcagtttttattaaacataacgtgggatctccacgcgaatctcgggtacgtgttccggacatgggctcttctccggtagcggcggagcttctacatccgagccctgctcccatgcctccagcgactcatggtcgctcggcagctccttgctcctaacagtggaggccagacttaggcacagcacgatgcccaccaccaccagtgtgccgcacaaggccgtggcggtagggtatgtgtctgaaaatgagctcggggagcgggcttgcaccgctgacgcatttggaagacttaaggcagcggcagaagaagatgcaggcagctgagttgttgtgttctgataagagtcagaggtaactcccgttgcggtgctgttaacggtggagggcagtgtagtctgagcagtactcgttgctgccgcgcgcgccaccagacataatagctgacagactaacagactgttcctttccatgggtcttttctgcagcacgtgttgacaattaatcatcggcatagtatatcggcatagtataatacgactcactataggagggccaccatgaagaccttcaacatctcccagcaggatctagaattagtagaagtagcgacagagaagattacaatgctttatgaggataataaacatcatgtgggagcggcaattcgtacgaaaacaggagaaatcatttcggcagtacatattgaagcgtatataggacgagtaactgtttgtgcagaagccattgcgattggtagtgcagtttcgaatggacaaaaggattttgacacgattgtagctgttagacacccttattctgacgaagtagatagaagtattcgagtggtaagtccttgtggtatgtgtagggagttgatttcagactatgcaccagattgttttgtgttaatagaaatgaatggcaagttagtcaaaactacgattgaagaactcattccactcaaatatacccgaaattaaaagaattcgctagagggccctattctatagtgtcacctaaatgctagagctcgctgatcagcctcgactgtgccttctagttgccagccatctgttgtttgcccctcccccgtgccttccttgaccctggaaggtgccactcccactgtcctttcctaataaaatgaggaaattgcatcgcattgtctgagtaggtgtcattctattctggggggtggggtggggcaggacagcaagggggaggattgggaagacaatagcaggcatgcgcagggcccaattgctcgagcggccgcaataaaatatctttattttcattacatctgtgtgttggttttttgtgtgaatcgtaactaacatacgctctccatcaaaacaaaacgaaacaaaacaaactagcaaaataggctgtccccagtgcaagtgcaggtgccagaacatttctctatcgaa

SEQ ID NO: 44 - DNA, 38 bp, Artificial Sequence
  Forward primer for amplifying DNA encoding the human plasminogen kringle 5 domain
gcgaagcttaccatgtacaggatgcaactcctgtcttg

SEQ ID NO: 45 - DNA, 43 bp, Artificial Sequence
  Reverse primer for amplifying DNA encoding the human plasminogen kringle 5 domain
gcgggatccagaaaaactaatcaaatgaaggggccgcacactg

SEQ ID NO: 46 - DNA, 4180 bp, Artificial Sequence
  pNCVVhaT-SEL-ADP-V5
gacgtctaagaaaccattattatcatgacattaacctataaaaataggcgtatcacgaggccctttcgtctcgcgcgtttcggtgatgacggtgaaaacctctgacacatgcagctcccggagacggtcacagcttgtctgtaagcggatgccgggagcagacaagcccgtcagggcgcgtcagcgggtgttggcgggtgtcggggctggcttaactatgcggcatcagagcagattgtactgagagtgcaccatatgacacgattaccaatacttttgttactaatatcattagtatacgctacaccttttcctcagacatctaaaaaaataggtgatgatgcaactctatcatgtaatcgaaataatacaaatgactacgttgttatgagtgcttggtataaggagcccaattccattattcttttagctgctaaaagcgacgtcttgtattttgataattataccaaggataaaatatcttacgactctccatacgatgatctagttacaactatcacaattaaatcattgactgctagagatgccggtacttatgtatgtgcattctttatgacatcgcctacaaatgacactgataaagtagattatgaagaatactccacagagttgattgtaaatacagatagtgaatcgactatagacataatactatctggatctacacattcaccggaaactagttctgagaaacctgattatatagataattctaattgctcgtcggtattcgaaatctaaaaattgaaattttattttttttttttggaatataaataagcttaccatgaccaacacaaccaacgcggccgccgctaccggacttacatctaccacaaatacaccccaagtttctgcctttgtcaataactgggataacttgggcatgtggtggttctccatagcgcttatgtttgtatgccttattattatgtggctcatctgctgcctaaagcgcaaacgcgcccgaccacccatctatagtcccatcattgtgctacacccaaacaatgatggaatccatagattggacggactgaaacacatgttcttttctcttacagtaggtaagcctatccctaaccctctcctcggtctcgattctacgtgatttttctggatccgactccggaaccaattactgataaagaagaagatcatacagttacagacactgtctcatacactacagtaagtacatcatctggaattgtcactactaaatcaaccaccgatgatacgtacaatgataatgatacagtaccaccaactactgtaggcggtagtacaacctctattagcaattataaaaccaaggactttgtagaaatatttggtattaccgcattaattatattgtcggccgtggcaatattctgtattacgtattatatatgtaataaacgttcacgtaaatacaaaacagagaacaaagtctagatttttgacttacataaatgtctgggatagtaaaatctatcagaattctagaaaagtagaaaatatattctaatttattgcacgggatgagcgaaaaatacatcgtcacctgggacatgttgcagatccatgcacgtaaactcgcaagccgactgatgccttctgaacaatggaaaggcattattgccgtaagccgtggcggtctggtaccgggtgcgttactggcgcgtgaactgggtattcgtcatgtcgataccgtttgtatttccagctacgatcacgacaaccagcgcgagcttaaagtgctgaaacgcgcagaaggcgatggcgaaggcttcatcgttattgatgacctggtggataccggtggtactgcggttgcgattcgtgaaatgtatccaaaagcgcactttgtcaccatcttcgcaaaaccggctggtcgtccgctggttgatgactatgttgttgatatcccgcaagatacctggattgaacagccgtgggatatgggcgtcgtattcgtcccgccaatctccggtcgctaaggatcagcttggcgtaatcatggtcatagctgtttcctgtgtgaaattgttatccgctcacaattccacacaacatacgagccggaagcataaagtgtaaagcctggggtgcctaatgagtgagctaactcacattaattgcgttgcgctcactgcccgctttccagtcgggaaacctgtcgtgccagctgcattaatgaatcggccaacgcgcggggagaggcggtttgcgtattgggcgctcttccgcttcctcgctcactgactcgctgcgctcggtcgttcggctgcggcgagcggtatcagctcactcaaaggcggtaatacggttatccacagaatcaggggataacgcaggaaagaacatgtgagcaaaaggccagcaaaaggccaggaaccgtaaaaaggccgcgttgctggcgtttttccataggctccgcccccctgacgagcatcacaaaaatcgacgctcaagtcagaggtggcgaaacccgacaggactataaagataccaggcgtttccccctggaagctccctcgtgcgctctcctgttccgaccctgccgcttaccggatacctgtccgcctttctcccttcgggaagcgtggcgctttctcatagctcacgctgtaggtatctcagttcggtgtaggtcgttcgctccaagctgggctgtgtgcacgaaccccccgttcagcccgaccgctgcgccttatccggtaactatcgtcttgagtccaacccggtaagacacgacttatcgccactggcagcagccactggtaacaggattagcagagcgaggtatgtaggcggtgctacagagttcttgaagtggtggcctaactacggctacactagaaggacagtatttggtatctgcgctctgctgaagccagttaccttcggaaaaagagttggtagctcttgatccggcaaacaaaccaccgctggtagcggtggtttttttgtttgcaagcagcagattacgcgcagaaaaaaaggatctcaagaagatcctttgatcttttctacggggtctgacgctcagtggaacgaaaactcacgttaagggattttggtcatgagattatcaaaaaggatcttcacctagatccttttaaattaaaaatgaagttttaaatcaatctaaagtatatatgagtaaacttggtctgacagttaccaatgcttaatcagtgaggcacctatctcagcgatctgtctatttcgttcatccatagttgcctgactccccgtcgtgtagataactacgatacgggagggcttaccatctggccccagtgctgcaatgataccgcgagacccacgctcaccggctccagatttatcagcaataaaccagccagccggaagggccgagcgcagaagtggtcctgcaactttatccgcctccatccagtctattaattgttgccgggaagctagagtaagtagttcgccagttaatagtttgcgcaacgttgttgccattgctacaggcatcgtggtgtcacgctcgtcgtttggtatggcttcattcagctccggttcccaacgatcaaggcgagttacatgatcccccatgttgtgcaaaaaagcggttagctccttcggtcctccgatcgttgtcagaagtaagttggccgcagtgttatcactcatggttatggcagcactgcataattctcttactgtcatgccatccgtaagatgcttttctgtgactggtgagtactcaaccaagtcattctgagaatagtgtatgcggcgaccgagttgctcttgcccggcgtcaatacgggataataccgcgccacatagcagaactttaaaagtgctcatcattggaaaacgttcttcggggcgaaaactctcaaggatcttaccgctgttgagatccagttcgatgtaacccactcgtgcacccaactgatcttcagcatcttttactttcaccagcgtttctgggtgagcaaaaacaggaaggcaaaatgccgcaaaaaagggaataagggcgacacggaaatgttgaatactcatactcttcctttttcaatattattgaagcatttatcagggttattgtctcatgagcggatacatatttgaatgtatttagaaaaataaacaaataggggttccgcgcacatttccccgaaaagtgccacct

SEQ ID NO: 47 - DNA, 4348 bp, Artificial Sequence
  pNCVVhaT-ftn
gacgtctaagaaaccattattatcatgacattaacctataaaaataggcgtatcacgaggccctttcgtctcgcgcgtttcggtgatgacggtgaaaacctctgacacatgcagctcccggagacggtcacagcttgtctgtaagcggatgccgggagcagacaagcccgtcagggcgcgtcagcgggtgttggcgggtgtcggggctggcttaactatgcggcatcagagcagattgtactgagagtgcaccatatgacacgattaccaatacttttgttactaatatcattagtatacgctacaccttttcctcagacatctaaaaaaataggtgatgatgcaactctatcatgtaatcgaaataatacaaatgactacgttgttatgagtgcttggtataaggagcccaattccattattcttttagctgctaaaagcgacgtcttgtattttgataattataccaaggataaaatatcttacgactctccatacgatgatctagttacaactatcacaattaaatcattgactgctagagatgccggtacttatgtatgtgcattctttatgacatcgcctacaaatgacactgataaagtagattatgaagaatactccacagagttgattgtaaatacagatagtgaatcgactatagacataatactatctggatctacacattcaccggaaactagttctgagaaacctgattatatagataattctaattgctcgtcggtattcgaaatctaagcttaaaaattgaaattttattttttttttttggaatataaataccatgctgaaaccagaaatgattgaaaaacttaatgagcagatgaacctggaactgtactcttcactgctttatcagcaaatgagcgcctggtgcagctatcataccttcgaaggtgctgccgcgttcctgcgccgtcacgcccaggaagagatgacgcatatgcagcgtctgtttgattacctgactgataccggcaatttaccgcgtattaataccgttgaatctccgtttgctgaatattcctcacttgatgaattattccaggaaacctataaacacgaacaattaatcacccagaaaattaacgaactggctcatgctgcaatgaccaatcaggactacccaacatttaatttcctgcaatggtatgtttctgagcagcatgaagaagagaaactgttcaaatcgattattgataaattaagcctggcaggcaaaagcggcgaaggtctgtattttatcgacaaagaactctctaccctcgacacacaaaactaaggatcccgactccggaaccaattactgataaagaagaagatcatacagttacagacactgtctcatacactacagtaagtacatcatctggaattgtcactactaaatcaaccaccgatgatacgtacaatgataatgatacagtaccaccaactactgtaggcggtagtacaacctctattagcaattataaaaccaaggactttgtagaaatatttggtattaccgcattaattatattgtcggccgtggcaatattctgtattacgtattatatatgtaataaacgttcacgtaaatacaaaacagagaacaaagtctagatttttgacttacataaatgtctgggatagtaaaatctatcagaattctagaaaagtagaaaatatattctaatttattgcacgggatgagcgaaaaatacatcgtcacctgggacatgttgcagatccatgcacgtaaactcgcaagccgactgatgccttctgaacaatggaaaggcattattgccgtaagccgtggcggtctggtaccgggtgcgttactggcgcgtgaactgggtattcgtcatgtcgataccgtttgtatttccagctacgatcacgacaaccagcgcgagcttaaagtgctgaaacgcgcagaaggcgatggcgaaggcttcatcgttattgatgacctggtggataccggtggtactgcggttgcgattcgtgaaatgtatccaaaagcgcactttgtcaccatcttcgcaaaaccggctggtcgtccgctggttgatgactatgttgttgatatcccgcaagatacctggattgaacagccgtgggatatgggcgtcgtattcgtcccgccaatctccggtcgctaaggatcagcttggcgtaatcatggtcatagctgtttcctgtgtgaaattgttatccgctcacaattccacacaacatacgagccggaagcataaagtgtaaagcctggggtgcctaatgagtgagctaactcacattaattgcgttgcgctcactgcccgctttccagtcgggaaacctgtcgtgccagctgcattaatgaatcggccaacgcgcggggagaggcggtttgcgtattgggcgctcttccgcttcctcgctcactgactcgctgcgctcggtcgttcggctgcggcgagcggtatcagctcactcaaaggcggtaatacggttatccacagaatcaggggataacgcaggaaagaacatgtgagcaaaaggccagcaaaaggccaggaaccgtaaaaaggccgcgttgctggcgtttttccataggctccgcccccctgacgagcatcacaaaaatcgacgctcaagtcagaggtggcgaaacccgacaggactataaagataccaggcgtttccccctggaagctccctcgtgcgctctcctgttccgaccctgccgcttaccggatacctgtccgcctttctcccttcgggaagcgtggcgctttctcatagctcacgctgtaggtatctcagttcggtgtaggtcgttcgctccaagctgggctgtgtgcacgaaccccccgttcagcccgaccgctgcgccttatccggtaactatcgtcttgagtccaacccggtaagacacgacttatcgccactggcagcagccactggtaacaggattagcagagcgaggtatgtaggcggtgctacagagttcttgaagtggtggcctaactacggctacactagaaggacagtatttggtatctgcgctctgctgaagccagttaccttcggaaaaagagttggtagctcttgatccggcaaacaaaccaccgctggtagcggtggtttttttgtttgcaagcagcagattacgcgcagaaaaaaaggatctcaagaagatcctttgatcttttctacggggtctgacgctcagtggaacgaaaactcacgttaagggattttggtcatgagattatcaaaaaggatcttcacctagatccttttaaattaaaaatgaagttttaaatcaatctaaagtatatatgagtaaacttggtctgacagttaccaatgcttaatcagtgaggcacctatctcagcgatctgtctatttcgttcatccatagttgcctgactccccgtcgtgtagataactacgatacgggagggcttaccatctggccccagtgctgcaatgataccgcgagacccacgctcaccggctccagatttatcagcaataaaccagccagccggaagggccgagcgcagaagtggtcctgcaactttatccgcctccatccagtctattaattgttgccgggaagctagagtaagtagttcgccagttaatagtttgcgcaacgttgttgccattgctacaggcatcgtggtgtcacgctcgtcgtttggtatggcttcattcagctccggttcccaacgatcaaggcgagttacatgatcccccatgttgtgcaaaaaagcggttagctccttcggtcctccgatcgttgtcagaagtaagttggccgcagtgttatcactcatggttatggcagcactgcataattctcttactgtcatgccatccgtaagatgcttttctgtgactggtgagtactcaaccaagtcattctgagaatagtgtatgcggcgaccgagttgctcttgcccggcgtcaatacgggataataccgcgccacatagcagaactttaaaagtgctcatcattggaaaacgttcttcggggcgaaaactctcaaggatcttaccgctgttgagatccagttcgatgtaacccactcgtgcacccaactgatcttcagcatcttttactttcaccagcgtttctgggtgagcaaaaacaggaaggcaaaatgccgcaaaaaagggaataagggcgacacggaaatgttgaatactcatactcttcctttttcaatattattgaagcatttatcagggttattgtctcatgagcggatacatatttgaatgtatttagaaaaataaacaaataggggttccgcgcacatttccccgaaaagtgccacct

SEQ ID NO: 48 - DNA, 498 bp, Escherichia coli
  DNA encoding E. coli ferritin (ftn)
atgctgaaaccagaaatgattgaaaaacttaatgagcagatgaacctggaactgtactcttcactgctttatcagcaaatgagcgcctggtgcagctatcataccttcgaaggtgctgccgcgttcctgcgccgtcacgcccaggaagagatgacgcatatgcagcgtctgtttgattacctgactgataccggcaatttaccgcgtattaataccgttgaatctccgtttgctgaatattcctcacttgatgaattattccaggaaacctataaacacgaacaattaatcacccagaaaattaacgaactggctcatgctgcaatgaccaatcaggactacccaacatttaatttcctgcaatggtatgtttctgagcagcatgaagaagagaaactgttcaaatcgattattgataaattaagcctggcaggcaaaagcggcgaaggtctgtattttatcgacaaagaactctctaccctcgacacacaaaactaa

SEQ ID NO: 49 - DNA, 78 bp, Artificial Sequence
  Primer 5`SSEL-ftn-VV3
aaagataagcttaaaaattgaaattttattttttttttttggaatataaataccatgctgaaaccagaaatgattgaa

SEQ ID NO: 50 - DNA, 33 bp, Artificial Sequence
  Primer 3`ftn-VV2
ataataggatccttagttttgtgtgtcgagggt

SEQ ID NO: 51 - DNA, 7983 bp, Artificial Sequence
  pCR-TK-SEL-mRFP1
agcgcccaatacgcaaaccgcctctccccgcgcgttggccgattcattaatgcagctggcacgacaggtttcccgactggaaagcgggcagtgagcgcaacgcaattaatgtgagttagctcactcattaggcaccccaggctttacactttatgcttccggctcgtatgttgtgtggaattgtgagcggataacaatttcacacaggaaacagctatgaccatgattacgccaagctttgttacagatggaagggtcaaacttaataaaggatatttgttcgactttgtgattagtttgatgcgattcaaaaaagaatcctctctagctaccaccgcaatagatcctgttagatacatagatcctcgtcgtgatatcgcattttctaacgtgatggatatattaaagtcgaataaagtgaacaataattaattctttattgtcatcatgaacggcggacatattcagttgataatcggccccatgttttcaggtaaaagtacagaattaattagacgagttagacgttatcaaatagctcaatataaatgcgtgactataaaatattctaacgataatagatacggaacgggactatggacgcatgataagaataattttgaagcattggaagcaactaaactatgtgatgtcttggaatcaattacagatttctccgtgataggtatcgatgaaggacagttctttccagacattgtttaattctgtgagcgtatggcaaacggtaccgagctcggtttggaattagtgaaagcttaaaaattgaaattttattttttttttttggaatataaataagctcgaagtcgacgccaccatggtgaagcgtgagaaaaatgtcatctatggccctgagcctctccatcctttggaggatttgactgccggcgaaatgctgtttcgtgctctccgcaagcactctcatttgcctcaagccttggtcgatgtggtcggcgatgaatctttgagctacaaggagttttttgaggcaaccgtcttgctggctcagtccctccacaattgtggctacaagatgaacgacgtcgttagtatctgtgctgaaaacaatacccgtttcttcattccagtcatcgccgcatggtatatcggtatgatcgtggctccagtcaacgagagctacattcccgacgaactgtgtaaagtcatgggtatctctaagccacagattgtcttcaccactaagaatattctgaacaaagtcctggaagtccaaagccgcaccaactttattaagcgtatcatcatcttggacactgtggagaatattcacggttgcgaatctttgcctaatttcatctctcgctattcagacggcaacatcgcaaactttaaaccactccacttcgaccctgtggaacaagttgcagccattctgtgtagcagcggtactactggactcccaaagggagtcatgcagacccatcaaaacatttgcgtgcgtctgatccatgctctcgatccacgcgtgggcactcagctgattcctggtgtcaccgtcttggtctacttgcctttcttccatgctttcggctttagcattactttgggttactttatggtcggtctccgcgtgattatgttccgccgttttgatcaggaggctttcttgaaagccatccaagattatgaagtccgcagtgtcatcaacgtgcctagcgtgatcctgtttttgtctaagagcccactcgtggacaagtacgacttgtcttcactgcgtgaattgtgttgcggtgccgctccactggctaaggaggtcgctgaagtggccgccaaacgcttgaatcttccagggattcgttgtggcttcggcctcaccgaatctaccagcgctaacattcactctctcggggatgagtttaagagcggctctttgggccgtgtcactccactcatggctgctaagatcgctgatcgcgaaactggtaaggctttgggcccgaaccaagtgggcgagctgtgtatcaaaggccctatggtgagcaagggttatgtcaataacgttgaagctaccaaggaggccatcgacgacgacggctggttgcattctggtgattttggatattacgacgaagatgagcatttttacgtcgtggatcgttacaaggagctgatcaaatacaagggtagccaggttgctccagctgagttggaggagattctgttgaaaaatccatgcattcgcgatgtcgctgtggtcggcattcctgatctggaggccggcgaactgccttctgctttcgttgtcaagcagcctggtaaagaaattaccgccaaagaagtgtatgattacctggctgaacgtgtgagccatactaagtacttgcgtggcggcgtgcgttttgttgactccatccctcgtaacgtaacaggcaaaattacccgcaaggagctgttgaaacaattgttggagaaggccggcggtggttccggagccacgaacttctctctgttaaagcaagcaggagacgtggaagaaaaccccggtcccatggcctcctccgaggacgtcatcaaggagttcatgcgcttcaaggtgcgcatggagggctccgtgaacggccacgagttcgagatcgagggagagggcgagggccgcccctacgagggcacccagaccgccaagctgaaggtgaccaagggcggccccctgcccttcgcctgggacatcctgtcccctcagttccagtacggctccaaggcctacgtgaagcaccccgccgacatccccgactacttgaagctgtccttccccgagggcttcaagtgggagcgcgtgatgaacttcgaggacggcggcgtggtgaccgtgacccaggactcctccctgcaggacggcgagttcatctacaaggtgaagctgcgcggcaccaacttcccctccgacggccccgtaatgcagaagaagaccatgggctgggaggcctccaccgagcggatgtaccccgaggacggcgccctgaagggcgagatcaagatgaggctgaagctgaaggacggcggccactacgacgccgaggtcaagaccacctacatggccaagaagcccgtgcagctgcccggcgcctacaagaccgacatcaagctggacatcacctcccacaacgaggactacaccatcgtggaacagtacgagcgcgccgagggccgccactccaccggcgcctaatgaaagggcgaattctgcagatgggtaattaattaatttttatcgatctaattcaacaatgtctggagagctcggatccttctgtgagcgtatggcaaacgaaggaaaaatagttatagtagccgcactcgatgggacatttcaacgtaaaccgtttaataatattttgaatcttattccattatctgaaatggtggtaaaactaactgctgtgtgtatgaaatgctttaaggaggcttccttttctaaacgattgggtgaggaaaccgagatagagataataggaggtaatgatatgtatcaatcggtgtgtagaaagtgttacgtcggctcataatattatattttttatctaaaaaactaaaaataaacattgattaaattttaatataatacttaaaaatggatgttgtgtcgttagataaaccgtttatgtattttgaggaaattgataatgagttagattacgaaccagaaagtgcaaatgaggtcgcaaaaaaactgccgtatcaaggacagttaaaactattactaggagaattattttttcttagtaagttacagcgacacggtatattagatggtgccaccgtagtgtactagttaacggccgccagtgtgctggaattctagaaaagtagaaaatatattctaatttattgcacgggatgagcgaaaaatacatcgtcacctgggacatgttgcagatccatgcacgtaaactcgcaagccgactgatgccttctgaacaatggaaaggcattattgccgtaagccgtggcggtctggtaccgggtgcgttactggcgcgtgaactgggtattcgtcatgtcgataccgtttgtatttccagctacgatcacgacaaccagcgcgagcttaaagtgctgaaacgcgcagaaggcgatggcgaaggcttcatcgttattgatgacctggtggataccggtggtactgcggttgcgattcgtgaaatgtatccaaaagcgcactttgtcaccatcttcgcaaaaccggctggtcgtccgctggttgatgactatgttgttgatatcccgcaagatacctggattgaacagccgtgggatatgggcgtcgtattcgtcccgccaatctccggtcgctaaggatcagcttggcgtaatcaagccgaattctgcagatatccatcacactggcggccgctcgagcatgcatctagagggcccaattcgccctatagtgagtcgtattacaattcactggccgtcgttttacaacgtcgtgactgggaaaaccctggcgttacccaacttaatcgccttgcagcacatccccctttcgccagctggcgtaatagcgaagaggcccgcaccgatcgcccttcccaacagttgcgcagcctgaatggcgaatggacgcgccctgtagcggcgcattaagcgcggcgggtgtggtggttacgcgcagcgtgaccgctacacttgccagcgccctagcgcccgctcctttcgctttcttcccttcctttctcgccacgttcgccggctttccccgtcaagctctaaatcgggggctccctttagggttccgatttagtgctttacggcacctcgaccccaaaaaacttgattagggtgatggttcacgtagtgggccatcgccctgatagacggtttttcgccctttgacgttggagtccacgttctttaatagtggactcttgttccaaactggaacaacactcaaccctatctcggtctattcttttgatttataagggattttgccgatttcggcctattggttaaaaaatgagctgatttaacaaaaatttaacgcgaattttaacaaaattcagggcgcaagggctgctaaaggaagcggaacacgtagaaagccagtccgcagaaacggtgctgaccccggatgaatgtcagctactgggctatctggacaagggaaaacgcaagcgcaaagagaaagcaggtagcttgcagtgggcttacatggcgatagctagactgggcggttttatggacagcaagcgaaccggaattgccagctggggcgccctctggtaaggttgggaagccctgcaaagtaaactggatggctttcttgccgccaaggatctgatggcgcaggggatcaagatctgatcaagagacaggatgaggatcgtttcgcatgattgaacaagatggattgcacgcaggttctccggccgcttgggtggagaggctattcggctatgactgggcacaacagacaatcggctgctctgatgccgccgtgttccggctgtcagcgcaggggcgcccggttctttttgtcaagaccgacctgtccggtgccctgaatgaactgcaggacgaggcagcgcggctatcgtggctggccacgacgggcgttccttgcgcagctgtgctcgacgttgtcactgaagcgggaagggactggctgctattgggcgaagtgccggggcaggatctcctgtcatcccaccttgctcctgccgagaaagtatccatcatggctgatgcaatgcggcggctgcatacgcttgatccggctacctgcccattcgaccaccaagcgaaacatcgcatcgagcgagcacgtactcggatggaagccggtcttgtcgatcaggatgatctggacgaagagcatcaggggctcgcgccagccgaactgttcgccaggctcaaggcgcgcatgcccgacggcgaggatctcgtcgtgacccatggcgatgcctgcttgccgaatatcatggtggaaaatggccgcttttctggattcatcgactgtggccggctgggtgtggcggaccgctatcaggacatagcgttggctacccgtgatattgctgaagagcttggcggcgaatgggctgaccgcttcctcgtgctttacggtatcgccgctcccgattcgcagcgcatcgccttctatcgccttcttgacgagttcttctgaattgaaaaaggaagagtatgagtattcaacatttccgtgtcgcccttattcccttttttgcggcattttgccttcctgtttttgctcacccagaaacgctggtgaaagtaaaagatgctgaagatcagttgggtgcacgagtgggttacatcgaactggatctcaacagcggtaagatccttgagagttttcgccccgaagaacgttttccaatgatgagcacttttaaagttctgctatgtggcgcggtattatcccgtattgacgccgggcaagagcaactcggtcgccgcatacactattctcagaatgacttggttgagtactcaccagtcacagaaaagcatcttacggatggcatgacagtaagagaattatgcagtgctgccataaccatgagtgataacactgcggccaacttacttctgacaacgatcggaggaccgaaggagctaaccgcttttttgcacaacatgggggatcatgtaactcgccttgatcgttgggaaccggagctgaatgaagccataccaaacgacgagcgtgacaccacgatgcctgtagcaatggcaacaacgttgcgcaaactattaactggcgaactacttactctagcttcccggcaacaattaatagactggatggaggcggataaagttgcaggaccacttctgcgctcggcccttccggctggctggtttattgctgataaatctggagccggtgagcgtgggtctcgcggtatcattgcagcactggggccagatggtaagccctcccgtatcgtagttatctacacgacggggagtcaggcaactatggatgaacgaaatagacagatcgctgagataggtgcctcactgattaagcattggtaactgtcagaccaagtttactcatatatactttagattgatttaaaacttcatttttaatttaaaaggatctaggtgaagatcctttttgataatctcatgaccaaaatcccttaacgtgagttttcgttccactgagcgtcagaccccgtagaaaagatcaaaggatcttcttgagatcctttttttctgcgcgtaatctgctgcttgcaaacaaaaaaaccaccgctaccagcggtggtttgtttgccggatcaagagctaccaactctttttccgaaggtaactggcttcagcagagcgcagataccaaatactgttcttctagtgtagccgtagttaggccaccacttcaagaactctgtagcaccgcctacatacctcgctctgctaatcctgttaccagtggctgctgccagtggcgataagtcgtgtcttaccgggttggactcaagacgatagttaccggataaggcgcagcggtcgggctgaacggggggttcgtgcacacagcccagcttggagcgaacgacctacaccgaactgagatacctacagcgtgagctatgagaaagcgccacgcttcccgaagggagaaaggcggacaggtatccggtaagcggcagggtcggaacaggagagcgcacgagggagcttccagggggaaacgcctggtatctttatagtcctgtcgggtttcgccacctctgacttgagcgtcgatttttgtgatgctcgtcaggggggcggagcctatggaaaaacgccagcaacgcggcctttttacggttcctggccttttgctggccttttgctcacatgttctttcctgcgttatcccctgattctgtggataaccgtattaccgcctttgagtgagctgataccgctcgccgcagccgaacgttgtttaattctgtgagcgtatggcaaacg

SEQ ID NO: 52 - DNA, 2370 bp, Artificial Sequence
  CBG99-2A-mRFP1 fusion protein
atggtgaagcgtgagaaaaatgtcatctatggccctgagcctctccatcctttggaggatttgactgccggcgaaatgctgtttcgtgctctccgcaagcactctcatttgcctcaagccttggtcgatgtggtcggcgatgaatctttgagctacaaggagttttttgaggcaaccgtcttgctggctcagtccctccacaattgtggctacaagatgaacgacgtcgttagtatctgtgctgaaaacaatacccgtttcttcattccagtcatcgccgcatggtatatcggtatgatcgtggctccagtcaacgagagctacattcccgacgaactgtgtaaagtcatgggtatctctaagccacagattgtcttcaccactaagaatattctgaacaaagtcctggaagtccaaagccgcaccaactttattaagcgtatcatcatcttggacactgtggagaatattcacggttgcgaatctttgcctaatttcatctctcgctattcagacggcaacatcgcaaactttaaaccactccacttcgaccctgtggaacaagttgcagccattctgtgtagcagcggtactactggactcccaaagggagtcatgcagacccatcaaaacatttgcgtgcgtctgatccatgctctcgatccacgcgtgggcactcagctgattcctggtgtcaccgtcttggtctacttgcctttcttccatgctttcggctttagcattactttgggttactttatggtcggtctccgcgtgattatgttccgccgttttgatcaggaggctttcttgaaagccatccaagattatgaagtccgcagtgtcatcaacgtgcctagcgtgatcctgtttttgtctaagagcccactcgtggacaagtacgacttgtcttcactgcgtgaattgtgttgcggtgccgctccactggctaaggaggtcgctgaagtggccgccaaacgcttgaatcttccagggattcgttgtggcttcggcctcaccgaatctaccagcgctaacattcactctctcggggatgagtttaagagcggctctttgggccgtgtcactccactcatggctgctaagatcgctgatcgcgaaactggtaaggctttgggcccgaaccaagtgggcgagctgtgtatcaaaggccctatggtgagcaagggttatgtcaataacgttgaagctaccaaggaggccatcgacgacgacggctggttgcattctggtgattttggatattacgacgaagatgagcatttttacgtcgtggatcgttacaaggagctgatcaaatacaagggtagccaggttgctccagctgagttggaggagattctgttgaaaaatccatgcattcgcgatgtcgctgtggtcggcattcctgatctggaggccggcgaactgccttctgctttcgttgtcaagcagcctggtaaagaaattaccgccaaagaagtgtatgattacctggctgaacgtgtgagccatactaagtacttgcgtggcggcgtgcgttttgttgactccatccctcgtaacgtaacaggcaaaattacccgcaaggagctgttgaaacaattgttggagaaggccggcggtggttccggagccacgaacttctctctgttaaagcaagcaggagacgtggaagaaaaccccggtcccatggcctcctccgaggacgtcatcaaggagttcatgcgcttcaaggtgcgcatggagggctccgtgaacggccacgagttcgagatcgagggagagggcgagggccgcccctacgagggcacccagaccgccaagctgaaggtgaccaagggcggccccctgcccttcgcctgggacatcctgtcccctcagttccagtacggctccaaggcctacgtgaagcaccccgccgacatccccgactacttgaagctgtccttccccgagggcttcaagtgggagcgcgtgatgaacttcgaggacggcggcgtggtgaccgtgacccaggactcctccctgcaggacggcgagttcatctacaaggtgaagctgcgcggcaccaacttcccctccgacggccccgtaatgcagaagaagaccatgggctgggaggcctccaccgagcggatgtaccccgaggacggcgccctgaagggcgagatcaagatgaggctgaagctgaaggacggcggccactacgacgccgaggtcaagaccacctacatggccaagaagcccgtgcagctgcccggcgcctacaagaccgacatcaagctggacatcacctcccacaacgaggactacaccatcgtggaacagtacgagcgcgccgagggccgccactccaccggcgcctaa

SEQ ID NO: 53 - DNA, 5869 bp, Artificial Sequence
  CBG99-2A-mRFP1
caattgcatgaagaatctgcttagggttaggcgttttgcgctgcttcgcgatgtacgggccagatatacgcgttgacattgattattgactagttattaatagtaatcaattacggggtcattagttcatagcccatatatggagttccgcgttacataacttacggtaaatggcccgcctggctgaccgcccaacgacccccgcccattgacgtcaataatgacgtatgttcccatagtaacgccaatagggactttccattgacgtcaatgggtggactatttacggtaaactgcccacttggcagtacatcaagtgtatcatatgccaagtacgccccctattgacgtcaatgacggtaaatggcccgcctggcattatgcccagtacatgaccttatgggactttcctacttggcagtacatctacgtattagtcatcgctattaccatggtgatgcggttttggcagtacatcaatgggcgtggatagcggtttgactcacggggatttccaagtctccaccccattgacgtcaatgggagtttgttttggcaccaaaatcaacgggactttccaaaatgtcgtaacaactccgccccattgacgcaaatgggcggtaggcgtgtacggtgggaggtctatataagcagagctctctggctaactagagaacccactgcttactggcttatcgaaattaatacgactcactatagggagacccaagcttggcattccggtactgttggtaaagccaccatggtgaagcgtgagaaaaatgtcatctatggccctgagcctctccatcctttggaggatttgactgccggcgaaatgctgtttcgtgctctccgcaagcactctcatttgcctcaagccttggtcgatgtggtcggcgatgaatctttgagctacaaggagttttttgaggcaaccgtcttgctggctcagtccctccacaattgtggctacaagatgaacgacgtcgttagtatctgtgctgaaaacaatacccgtttcttcattccagtcatcgccgcatggtatatcggtatgatcgtggctccagtcaacgagagctacattcccgacgaactgtgtaaagtcatgggtatctctaagccacagattgtcttcaccactaagaatattctgaacaaagtcctggaagtccaaagccgcaccaactttattaagcgtatcatcatcttggacactgtggagaatattcacggttgcgaatctttgcctaatttcatctctcgctattcagacggcaacatcgcaaactttaaaccactccacttcgaccctgtggaacaagttgcagccattctgtgtagcagcggtactactggactcccaaagggagtcatgcagacccatcaaaacatttgcgtgcgtctgatccatgctctcgatccacgcgtgggcactcagctgattcctggtgtcaccgtcttggtctacttgcctttcttccatgctttcggctttagcattactttgggttactttatggtcggtctccgcgtgattatgttccgccgttttgatcaggaggctttcttgaaagccatccaagattatgaagtccgcagtgtcatcaacgtgcctagcgtgatcctgtttttgtctaagagcccactcgtggacaagtacgacttgtcttcactgcgtgaattgtgttgcggtgccgctccactggctaaggaggtcgctgaagtggccgccaaacgcttgaatcttccagggattcgttgtggcttcggcctcaccgaatctaccagcgctaacattcactctctcggggatgagtttaagagcggctctttgggccgtgtcactccactcatggctgctaagatcgctgatcgcgaaactggtaaggctttgggcccgaaccaagtgggcgagctgtgtatcaaaggccctatggtgagcaagggttatgtcaataacgttgaagctaccaaggaggccatcgacgacgacggctggttgcattctggtgattttggatattacgacgaagatgagcatttttacgtcgtggatcgttacaaggagctgatcaaatacaagggtagccaggttgctccagctgagttggaggagattctgttgaaaaatccatgcattcgcgatgtcgctgtggtcggcattcctgatctggaggccggcgaactgccttctgctttcgttgtcaagcagcctggtaaagaaattaccgccaaagaagtgtatgattacctggctgaacgtgtgagccatactaagtacttgcgtggcggcgtgcgttttgttgactccatccctcgtaacgtaacaggcaaaattacccgcaaggagctgttgaaacaattgttggagaaggccggcggtggttccggagccacgaacttctctctgttaaagcaagcaggagacgtggaagaaaaccccggtcccatggcctcctccgaggacgtcatcaaggagttcatgcgcttcaaggtgcgcatggagggctccgtgaacggccacgagttcgagatcgagggagagggcgagggccgcccctacgagggcacccagaccgccaagctgaaggtgaccaagggcggccccctgcccttcgcctgggacatcctgtcccctcagttccagtacggctccaaggcctacgtgaagcaccccgccgacatccccgactacttgaagctgtccttccccgagggcttcaagtgggagcgcgtgatgaacttcgaggacggcggcgtggtgaccgtgacccaggactcctccctgcaggacggcgagttcatctacaaggtgaagctgcgcggcaccaacttcccctccgacggccccgtaatgcagaagaagaccatgggctgggaggcctccaccgagcggatgtaccccgaggacggcgccctgaagggcgagatcaagatgaggctgaagctgaaggacggcggccactacgacgccgaggtcaagaccacctacatggccaagaagcccgtgcagctgcccggcgcctacaagaccgacatcaagctggacatcacctcccacaacgaggactacaccatcgtggaacagtacgagcgcgccgagggccgccactccaccggcgcctaatgatcagcctcgactgtgccttctagttgccagccatctgttgtttgcccctcccccgtgccttccttgaccctggaaggtgccactcccactgtcctttcctaataaaatgaggaaattgcatcgcattgtctgagtaggtgtcattctattctggggggtggggtggggcaggacagcaagggggaggattgggaagacaatagcaggcatgctggggatgcggtgggctctatggcttctgaggcggaaagaaccagctggggctcgaggaagttcctattctctagaaagtataggaacttcgcggccgctcgcgcactactcagcgacctccaacacacaagcagggagcagatactggcttaactatgcggcatcagagcagattgtactgagagtcgaccataggggatcgggagatctcccgatccgtcgacgtcaggtggcacttttcggggaaatgtgcgcggaacccctatttgtttatttttctaaatacattcaaatatgtatccgctcatgagacaataaccctgataaatgcttcaataatattgaaaaaggaagagtatgagtattcaacatttccgtgtcgcccttattcccttttttgcggcattttgccttcctgtttttgctcacccagaaacgctggtgaaagtaaaagatgctgaagatcagttgggtgcacgagtgggttacatcgaactggatctcaacagcggtaagatccttgagagttttcgccccgaagaacgttttccaatgatgagcacttttaaagttctgctatgtggcgcggtattatcccgtattgacgccgggcaagagcaactcggtcgccgcatacactattctcagaatgacttggttgagtactcaccagtcacagaaaagcatcttacggatggcatgacagtaagagaattatgcagtgctgccataaccatgagtgataacactgcggccaacttacttctgacaacgatcggaggaccgaaggagctaaccgcttttttgcacaacatgggggatcatgtaactcgccttgatcgttgggaaccggagctgaatgaagccataccaaacgacgagcgtgacaccacgatgcctgtagcaatggcaacaacgttgcgcaaactattaactggcgaactacttactctagcttcccggcaacaattaatagactggatggaggcggataaagttgcaggaccacttctgcgctcggcccttccggctggctggtttattgctgataaatctggagccggtgagcgtgggtctcgcggtatcattgcagcactggggccagatggtaagccctcccgtatcgtagttatctacacgacggggagtcaggcaactatggatgaacgaaatagacagatcgctgagataggtgcctcactgattaagcattggtaagaagttcctattctctagaaagtataggaacttcttaattaacggctagctgcattctagttgtggtttgtccaaactcatcaatgtatcttatcatgtctgtataccgtcgacctctagctagagcttggcgtaatcatggtcatagctgtttcctgtgtgaaattgttatccgctcacaattccacacaacatacgagccggaagcataaagtgtaaagcctggggtgcctaatgagtgagctaactcacattaattgcgttgcgctcactgcccgctttccagtcgggaaacctgtcgtgccagctgcattaatgaatcggccaacgcgcggggagaggcggtttgcgtattgggcgctcttccgcttcctcgctcactgactcgctgcgctcggtcgttcggctgcggcgagcggtatcagctcactcaaaggcggtaatacggttatccacagaatcaggggataacgcaggaaagaacatgtgagcaaaaggccagcaaaaggccaggaaccgtaaaaaggccgcgttgctggcgtttttccataggctccgcccccctgacgagcatcacaaaaatcgacgctcaagtcagaggtggcgaaacccgacaggactataaagataccaggcgtttccccctggaagctccctcgtgcgctctcctgttccgaccctgccgcttaccggatacctgtccgcctttctcccttcgggaagcgtggcgctttctcaatgctcacgctgtaggtatctcagttcggtgtaggtcgttcgctccaagctgggctgtgtgcacgaaccccccgttcagcccgaccgctgcgccttatccggtaactatcgtcttgagtccaacccggtaagacacgacttatcgccactggcagcagccactggtaacaggattagcagagcgaggtatgtaggcggtgctacagagttcttgaagtggtggcctaactacggctacactagaaggacagtatttggtatctgcgctctgctgaagccagttaccttcggaaaaagagttggtagctcttgatccggcaaacaaaccaccgctggtagcggtggtttttttgtttgcaagcagcagattacgcgcagaaaaaaaggatctcaagaagatcctttgatcttttctacggggtctgacgctcagtggaacgaaaactcacgttaagggattttggtcatgagattatcaaaaaggatcttcacctagatccttttaaattaaaaatgaagttttaaatcaatctaaagtatatatgagtaaacttggtctgacag

SEQ ID NO: 54 - DNA, 27 bp, Artificial Sequence
  Primer mRFP5
gtcgacgccaccatggtgaagcgtgag

SEQ ID NO: 55 - DNA, 20 bp, Artificial Sequence
  Primer mRFP3
tcattaggcgccggtggagt

SEQ ID NO: 56 - DNA, 5904 bp, Artificial Sequence
  pCRII-mRFP
agcgcccaatacgcaaaccgcctctccccgcgcgttggccgattcattaatgcagctggcacgacaggtttcccgactggaaagcgggcagtgagcgcaacgcaattaatgtgagttagctcactcattaggcaccccaggctttacactttatgcttccggctcgtatgttgtgtggaattgtgagcggataacaatttcacacaggaaacagctatgaccatgattacgccaagctatttaggtgacactatagaatactcaagctatgcatcaagcttggtaccgagctcggatccactagtaacggccgccagtgtgctggaattcgcccttgtcgacgccaccatggtgaagcgtgagaaaaatgtcatctatggccctgagcctctccatcctttggaggatttgactgccggcgaaatgctgtttcgtgctctccgcaagcactctcatttgcctcaagccttggtcgatgtggtcggcgatgaatctttgagctacaaggagttttttgaggcaaccgtcttgctggctcagtccctccacaattgtggctacaagatgaacgacgtcgttagtatctgtgctgaaaacaatacccgtttcttcattccagtcatcgccgcatggtatatcggtatgatcgtggctccagtcaacgagagctacattcccgacgaactgtgtaaagtcatgggtatctctaagccacagattgtcttcaccactaagaatattctgaacaaagtcctggaagtccaaagccgcaccaactttattaagcgtatcatcatcttggacactgtggagaatattcacggttgcgaatctttgcctaatttcatctctcgctattcagacggcaacatcgcaaactttaaaccactccacttcgaccctgtggaacaagttgcagccattctgtgtagcagcggtactactggactcccaaagggagtcatgcagacccatcaaaacatttgcgtgcgtctgatccatgctctcgatccacgcgtgggcactcagctgattcctggtgtcaccgtcttggtctacttgcctttcttccatgctttcggctttagcattactttgggttactttatggtcggtctccgcgtgattatgttccgccgttttgatcaggaggctttcttgaaagccatccaagattatgaagtccgcagtgtcatcaacgtgcctagcgtgatcctgtttttgtctaagagcccactcgtggacaagtacgacttgtcttcactgcgtgaattgtgttgcggtgccgctccactggctaaggaggtcgctgaagtggccgccaaacgcttgaatcttccagggattcgttgtggcttcggcctcaccgaatctaccagcgctaacattcactctctcggggatgagtttaagagcggctctttgggccgtgtcactccactcatggctgctaagatcgctgatcgcgaaactggtaaggctttgggcccgaaccaagtgggcgagctgtgtatcaaaggccctatggtgagcaagggttatgtcaataacgttgaagctaccaaggaggccatcgacgacgacggctggttgcattctggtgattttggatattacgacgaagatgagcatttttacgtcgtggatcgttacaaggagctgatcaaatacaagggtagccaggttgctccagctgagttggaggagattctgttgaaaaatccatgcattcgcgatgtcgctgtggtcggcattcctgatctggaggccggcgaactgccttctgctttcgttgtcaagcagcctggtaaagaaattaccgccaaagaagtgtatgattacctggctgaacgtgtgagccatactaagtacttgcgtggcggcgtgcgttttgttgactccatccctcgtaacgtaacaggcaaaattacccgcaaggagctgttgaaacaattgttggagaaggccggcggtggttccggagccacgaacttctctctgttaaagcaagcaggagacgtggaagaaaaccccggtcccatggcctcctccgaggacgtcatcaaggagttcatgcgcttcaaggtgcgcatggagggctccgtgaacggccacgagttcgagatcgagggagagggcgagggccgcccctacgagggcacccagaccgccaagctgaaggtgaccaagggcggccccctgcccttcgcctgggacatcctgtcccctcagttccagtacggctccaaggcctacgtgaagcaccccgccgacatccccgactacttgaagctgtccttccccgagggcttcaagtgggagcgcgtgatgaacttcgaggacggcggcgtggtgaccgtgacccaggactcctccctgcaggacggcgagttcatctacaaggtgaagctgcgcggcaccaacttcccctccgacggccccgtaatgcagaagaagaccatgggctgggaggcctccaccgagcggatgtaccccgaggacggcgccctgaagggcgagatcaagatgaggctgaagctgaaggacggcggccactacgacgccgaggtcaagaccacctacatggccaagaagcccgtgcagctgcccggcgcctacaagaccgacatcaagctggacatcacctcccacaacgaggactacaccatcgtggaacagtacgagcgcgccgagggccgccactccaccggcgcctaatgaaagggcgaattctgcagatatccatcacactggcggccgctcgagcatgcatctagagggcccaattcgccctatagtgagtcgtattacaattcactggccgtcgttttacaacgtcgtgactgggaaaaccctggcgttacccaacttaatcgccttgcagcacatccccctttcgccagctggcgtaatagcgaagaggcccgcaccgatcgcccttcccaacagttgcgcagcctatacgtacggcagtttaaggtttacacctataaaagagagagccgttatcgtctgtttgtggatgtacagagtgatattattgacacgccggggcgacggatggtgatccccctggccagtgcacgtctgctgtcagataaagtctcccgtgaactttacccggtggtgcatatcggggatgaaagctggcgcatgatgaccaccgatatggccagtgtgccggtctccgttatcggggaagaagtggctgatctcagccaccgcgaaaatgacatcaaaaacgccattaacctgatgttctggggaatataaatgtcaggcatgagattatcaaaaaggatcttcacctagatccttttcacgtagaaagccagtccgcagaaacggtgctgaccccggatgaatgtcagctactgggctatctggacaagggaaaacgcaagcgcaaagagaaagcaggtagcttgcagtgggcttacatggcgatagctagactgggcggttttatggacagcaagcgaaccggaattgccagctggggcgccctctggtaaggttgggaagccctgcaaagtaaactggatggctttctcgccgccaaggatctgatggcgcaggggatcaagctctgatcaagagacaggatgaggatcgtttcgcatgattgaacaagatggattgcacgcaggttctccggccgcttgggtggagaggctattcggctatgactgggcacaacagacaatcggctgctctgatgccgccgtgttccggctgtcagcgcaggggcgcccggttctttttgtcaagaccgacctgtccggtgccctgaatgaactgcaagacgaggcagcgcggctatcgtggctggccacgacgggcgttccttgcgcagctgtgctcgacgttgtcactgaagcgggaagggactggctgctattgggcgaagtgccggggcaggatctcctgtcatctcaccttgctcctgccgagaaagtatccatcatggctgatgcaatgcggcggctgcatacgcttgatccggctacctgcccattcgaccaccaagcgaaacatcgcatcgagcgagcacgtactcggatggaagccggtcttgtcgatcaggatgatctggacgaagagcatcaggggctcgcgccagccgaactgttcgccaggctcaaggcgagcatgcccgacggcgaggatctcgtcgtgacccatggcgatgcctgcttgccgaatatcatggtggaaaatggccgcttttctggattcatcgactgtggccggctgggtgtggcggaccgctatcaggacatagcgttggctacccgtgatattgctgaagagcttggcggcgaatgggctgaccgcttcctcgtgctttacggtatcgccgctcccgattcgcagcgcatcgccttctatcgccttcttgacgagttcttctgaattattaacgcttacaatttcctgatgcggtattttctccttacgcatctgtgcggtatttcacaccgcatacaggtggcacttttcggggaaatgtgcgcggaacccctatttgtttatttttctaaatacattcaaatatgtatccgctcatgagacaataaccctgataaatgcttcaataatagcacgtgaggagggccaccatggccaagttgaccagtgccgttccggtgctcaccgcgcgcgacgtcgccggagcggtcgagttctggaccgaccggctcgggttctcccgggacttcgtggaggacgacttcgccggtgtggtccgggacgacgtgaccctgttcatcagcgcggtccaggaccaggtggtgccggacaacaccctggcctgggtgtgggtgcgcggcctggacgagctgtacgccgagtggtcggaggtcgtgtccacgaacttccgggacgcctccgggccggccatgaccgagatcggcgagcagccgtgggggcgggagttcgccctgcgcgacccggccggcaactgcgtgcacttcgtggccgaggagcaggactgacacgtgctaaaacttcatttttaatttaaaaggatctaggtgaagatcctttttgataatctcatgaccaaaatcccttaacgtgagttttcgttccactgagcgtcagaccccgtagaaaagatcaaaggatcttcttgagatcctttttttctgcgcgtaatctgctgcttgcaaacaaaaaaaccaccgctaccagcggtggtttgtttgccggatcaagagctaccaactctttttccgaaggtaactggcttcagcagagcgcagataccaaatactgtccttctagtgtagccgtagttaggccaccacttcaagaactctgtagcaccgcctacatacctcgctctgctaatcctgttaccagtggctgctgccagtggcgataagtcgtgtcttaccgggttggactcaagacgatagttaccggataaggcgcagcggtcgggctgaacggggggttcgtgcacacagcccagcttggagcgaacgacctacaccgaactgagatacctacagcgtgagctatgagaaagcgccacgcttcccgaagggagaaaggcggacaggtatccggtaagcggcagggtcggaacaggagagcgcacgagggagcttccagggggaaacgcctggtatctttatagtcctgtcgggtttcgccacctctgacttgagcgtcgatttttgtgatgctcgtcaggggggcggagcctatggaaaaacgccagcaacgcggcctttttacggttcctgggcttttgctggccttttgctcacatgttctttcctgcgttatcccctgattctgtggataaccgtattaccgcctttgagtgagctgataccgctcgccgcagccgaacgaccgagcgcagcgagtcagtgagcgaggaagcggaag

SEQ ID NO: 57 - DNA, 6475 bp, Artificial Sequence
  pCR-SEL-mRFP1
agcgcccaatacgcaaaccgcctctccccgcgcgttggccgattcattaatgcagctggcacgacaggtttcccgactggaaagcgggcagtgagcgcaacgcaattaatgtgagttagctcactcattaggcaccccaggctttacactttatgcttccggctcgtatgttgtgtggaattgtgagcggataacaatttcacacaggaaacagctatgaccatgattacgccaagcttggtaccgagctctccagacattgttgaattagatcgataaaaattaattaattacccatctgcagaattcgccctttcattaggcgccggtggagtggcggccctcggcgcgctcgtactgttccacgatggtgtagtcctcgttgtgggaggtgatgtccagcttgatgtcggtcttgtaggcgccgggcagctgcacgggcttcttggccatgtaggtggtcttgacctcggcgtcgtagtggccgccgtccttcagcttcagcctcatcttgatctcgcccttcagggcgccgtcctcggggtacatccgctcggtggaggcctcccagcccatggtcttcttctgcattacggggccgtcggaggggaagttggtgccgcgcagcttcaccttgtagatgaactcgccgtcctgcagggaggagtcctgggtcacggtcaccacgccgccgtcctcgaagttcatcacgcgctcccacttgaagccctcggggaaggacagcttcaagtagtcggggatgtcggcggggtgcttcacgtaggccttggagccgtactggaactgaggggacaggatgtcccaggcgaagggcagggggccgcccttggtcaccttcagcttggcggtctgggtgccctcgtaggggcggccctcgccctctccctcgatctcgaactcgtggccgttcacggagccctccatgcgcaccttgaagcgcatgaactccttgatgacgtcctcggaggaggccatgggaccggggttttcttccacgtctcctgcttgctttaacagagagaagttcgtggctccggaaccaccgccggccttctccaacaattgtttcaacagctccttgcgggtaattttgcctgttacgttacgagggatggagtcaacaaaacgcacgccgccacgcaagtacttagtatggctcacacgttcagccaggtaatcatacacttctttggcggtaatttctttaccaggctgcttgacaacgaaagcagaaggcagttcgccggcctccagatcaggaatgccgaccacagcgacatcgcgaatgcatggatttttcaacagaatctcctccaactcagctggagcaacctggctacccttgtatttgatcagctccttgtaacgatccacgacgtaaaaatgctcatcttcgtcgtaatatccaaaatcaccagaatgcaaccagccgtcgtcgtcgatggcctccttggtagcttcaacgttattgacataacccttgctcaccatagggcctttgatacacagctcgcccacttggttcgggcccaaagccttaccagtttcgcgatcagcgatcttagcagccatgagtggagtgacacggcccaaagagccgctcttaaactcatccccgagagagtgaatgttagcgctggtagattcggtgaggccgaagccacaacgaatccctggaagattcaagcgtttggcggccacttcagcgacctccttagccagtggagcggcaccgcaacacaattcacgcagtgaagacaagtcgtacttgtccacgagtgggctcttagacaaaaacaggatcacgctaggcacgttgatgacactgcggacttcataatcttggatggctttcaagaaagcctcctgatcaaaacggcggaacataatcacgcggagaccgaccataaagtaacccaaagtaatgctaaagccgaaagcatggaagaaaggcaagtagaccaagacggtgacaccaggaatcagctgagtgcccacgcgtggatcgagagcatggatcagacgcacgcaaatgttttgatgggtctgcatgactccctttgggagtccagtagtaccgctgctacacagaatggctgcaacttgttccacagggtcgaagtggagtggtttaaagtttgcgatgttgccgtctgaatagcgagagatgaaattaggcaaagattcgcaaccgtgaatattctccacagtgtccaagatgatgatacgcttaataaagttggtgcggctttggacttccaggactttgttcagaatattcttagtggtgaagacaatctgtggcttagagatacccatgactttacacagttcgtcgggaatgtagctctcgttgactggagccacgatcataccgatataccatgcggcgatgactggaatgaagaaacgggtattgttttcagcacagatactaacgacgtcgttcatcttgtagccacaattgtggagggactgagccagcaagacggttgcctcaaaaaactccttgtagctcaaagattcatcgccgaccacatcgaccaaggcttgaggcaaatgagagtgcttgcggagagcacgaaacagcatttcgccggcagtcaaatcctccaaaggatggagaggctcagggccatagatgacatttttctcacgcttcaccatggtggcgtcgacttcgagcttatttatattccaaaaaaaaaaaataaaatttcaatttttaagctttcactaattccaaaccgagctcggatccttctgtgagcgtatggcagatggtgccaccgtagtgtactagtaacggccgccagtgtgctggaattctgcagatatccatcacactggcggccgctcgagcatgcatctagagggcccaattcgccctatagtgagtcgtattacaattcactggccgtcgttttacaacgtcgtgactgggaaaaccctggcgttacccaacttaatcgccttgcagcacatccccctttcgccagctggcgtaatagcgaagaggcccgcaccgatcgcccttcccaacagttgcgcagcctgaatggcgaatggacgcgccctgtagcggcgcattaagcgcggcgggtgtggtggttacgcgcagcgtgaccgctacacttgccagcgccctagcgcccgctcctttcgctttcttcccttcctttctcgccacgttcgccggctttccccgtcaagctctaaatcgggggctccctttagggttccgatttagtgctttacggcacctcgaccccaaaaaacttgattagggtgatggttcacgtagtgggccatcgccctgatagacggtttttcgccctttgacgttggagtccacgttctttaatagtggactcttgttccaaactggaacaacactcaaccctatctcggtctattcttttgatttataagggattttgccgatttcggcctattggttaaaaaatgagctgatttaacaaaaatttaacgcgaattttaacaaaattcagggcgcaagggctgctaaaggaagcggaacacgtagaaagccagtccgcagaaacggtgctgaccccggatgaatgtcagctactgggctatctggacaagggaaaacgcaagcgcaaagagaaagcaggtagcttgcagtgggcttacatggcgatagctagactgggcggttttatggacagcaagcgaaccggaattgccagctggggcgccctctggtaaggttgggaagccctgcaaagtaaactggatggctttcttgccgccaaggatctgatggcgcaggggatcaagatctgatcaagagacaggatgaggatcgtttcgcatgattgaacaagatggattgcacgcaggttctccggccgcttgggtggagaggctattcggctatgactgggcacaacagacaatcggctgctctgatgccgccgtgttccggctgtcagcgcaggggcgcccggttctttttgtcaagaccgacctgtccggtgccctgaatgaactgcaggacgaggcagcgcggctatcgtggctggccacgacgggcgttccttgcgcagctgtgctcgacgttgtcactgaagcgggaagggactggctgctattgggcgaagtgccggggcaggatctcctgtcatcccaccttgctcctgccgagaaagtatccatcatggctgatgcaatgcggcggctgcatacgcttgatccggctacctgcccattcgaccaccaagcgaaacatcgcatcgagcgagcacgtactcggatggaagccggtcttgtcgatcaggatgatctggacgaagagcatcaggggctcgcgccagccgaactgttcgccaggctcaaggcgcgcatgcccgacggcgaggatctcgtcgtgacccatggcgatgcctgcttgccgaatatcatggtggaaaatggccgcttttctggattcatcgactgtggccggctgggtgtggcggaccgctatcaggacatagcgttggctacccgtgatattgctgaagagcttggcggcgaatgggctgaccgcttcctcgtgctttacggtatcgccgctcccgattcgcagcgcatcgccttctatcgccttcttgacgagttcttctgaattgaaaaaggaagagtatgagtattcaacatttccgtgtcgcccttattcccttttttgcggcattttgccttcctgtttttgctcacccagaaacgctggtgaaagtaaaagatgctgaagatcagttgggtgcacgagtgggttacatcgaactggatctcaacagcggtaagatccttgagagttttcgccccgaagaacgttttccaatgatgagcacttttaaagttctgctatgtggcgcggtattatcccgtattgacgccgggcaagagcaactcggtcgccgcatacactattctcagaatgacttggttgagtactcaccagtcacagaaaagcatcttacggatggcatgacagtaagagaattatgcagtgctgccataaccatgagtgataacactgcggccaacttacttctgacaacgatcggaggaccgaaggagctaaccgcttttttgcacaacatgggggatcatgtaactcgccttgatcgttgggaaccggagctgaatgaagccataccaaacgacgagcgtgacaccacgatgcctgtagcaatggcaacaacgttgcgcaaactattaactggcgaactacttactctagcttcccggcaacaattaatagactggatggaggcggataaagttgcaggaccacttctgcgctcggcccttccggctggctggtttattgctgataaatctggagccggtgagcgtgggtctcgcggtatcattgcagcactggggccagatggtaagccctcccgtatcgtagttatctacacgacggggagtcaggcaactatggatgaacgaaatagacagatcgctgagataggtgcctcactgattaagcattggtaactgtcagaccaagtttactcatatatactttagattgatttaaaacttcatttttaatttaaaaggatctaggtgaagatcctttttgataatctcatgaccaaaatcccttaacgtgagttttcgttccactgagcgtcagaccccgtagaaaagatcaaaggatcttcttgagatcctttttttctgcgcgtaatctgctgcttgcaaacaaaaaaaccaccgctaccagcggtggtttgtttgccggatcaagagctaccaactctttttccgaaggtaactggcttcagcagagcgcagataccaaatactgttcttctagtgtagccgtagttaggccaccacttcaagaactctgtagcaccgcctacatacctcgctctgctaatcctgttaccagtggctgctgccagtggcgataagtcgtgtcttaccgggttggactcaagacgatagttaccggataaggcgcagcggtcgggctgaacggggggttcgtgcacacagcccagcttggagcgaacgacctacaccgaactgagatacctacagcgtgagctatgagaaagcgccacgcttcccgaagggagaaaggcggacaggtatccggtaagcggcagggtcggaacaggagagcgcacgagggagcttccagggggaaacgcctggtatctttatagtcctgtcgggtttcgccacctctgacttgagcgtcgatttttgtgatgctcgtcaggggggcggagcctatggaaaaacgccagcaacgcggcctttttacggttcctggccttttgctggccttttgctcacatgttctttcctgcgttatcccctgattctgtggataaccgtattaccgcctttgagtgagctgataccgctcgccgcagccgaacgaccgagcgcagcgagtcagtgagcgaggaagcggaag

SEQ ID NO: 58 - DNA, 507 bp, Artificial Sequence
  A34R coding sequence from strain IHD-J
atgaaatcgcttaatagacaaactgtaagtaggtttaagaagttgtcggtgccggccgctataatgatgatactctcaaccattattagtggcataggaacatttctgcattacaaagaagaactgatgcctagtgcttgcgccaatggatggatacaatacgataaacattgttatctagataccaacattaaaatgtctacagataatgcggtttatcagtgtcgtaaattacgagctagattgcctagacctgatactagacatctgagagtattgtttagtattttttataaagattattgggtaagtttaaaaaagaccaataataaatggttagatattaataatgataaagatatagatattagtaaattaacaaattttaaacaactaaacagtacgacggatgctgaagcgtgttatatatacaagtctggaaaactggttgaaacagtatgtaaaagtactcaatctgtactatgtgttaaaaaattctacaagtga

SEQ ID NO: 59 - DNA, 26 bp, Artificial Sequence
  Primer A34R F
cattaataaatgaaatcgcttaatag

SEQ ID NO: 60 - DNA, 19 bp, Artificial Sequence
  Primer A34R R
ggcggcgtacgttaacgac

SEQ ID NO: 61 - DNA, 507 bp, Artificial Sequence
  A34R coding sequence from GLV-1h68
atgaaatcgcttaatagacaaactgtaagtaggtttaagaagttgtcggtgccggccgctataatgatgatactctcaaccattattagtggcataggaacatttctgcattacaaagaagaactgatgcctagtgcttgcgccaatggatggatacaatacgataaacattgttatttagatactaacattaaaatgtctacagataatgcggtttatcagtgtcgtaaattacgagctagattgcctagacctgatactagacatctgagagtattgtttagtattttttataaagattattgggtaagtttaaaaaagaccaatgataaatggttagatattaataatgataaagatatagatattagtaaattaacaaattttaaacaactaaacagtacgacggatgctgaagcgtgttatatatacaagtctggaaaactggttaaaacagtatgtaaaagtactcaatctgtactatgtgttaaaaaattctacaagtga

SEQ ID NO: 62 - DNA, 31 bp, Artificial Sequence
  IL-6 forward primer
gtcgacccaccatgctggccgtcggctgcgc

SEQ ID NO: 63 - DNA, 26 bp, Artificial Sequence
  IL-6 reverse primer
ggtaccctagagtcgcggccgcgacc

SEQ ID NO: 64 - DNA, 32 bp, Artificial Sequence
  IL-24 forward primer
gtcgaccaccatgaattttcaacagaggctgc

SEQ ID NO: 65 - DNA, 34 bp, Artificial Sequence
  IL-24 reverse primer
cccgggttatcagagcttgtagaatttctgcatc

SEQ ID NO: 66 - DNA, 31 bp, Artificial Sequence
  A34R-L Primer
atctcgagtgaggatacatggggatctgatg

SEQ ID NO: 67 - DNA, 38 bp, Artificial Sequence
  A34R-R Primer
atgagctcccgggaagcttggcggcgtacgttaacgac

SEQ ID NO: 68 - DNA, 34 bp, Artificial Sequence
  A36R-L Primer
atgagctcggatcctgcatatcagacggcaatgg

SEQ ID NO: 69 - DNA, 27 bp, Artificial Sequence
  A36R-R Primer
atgggcccatcgctatgtgctcgtcta

SEQ ID NO: 70 - DNA, 81 bp, Artificial Sequence
  Primer GM-CSF5
ctagtcgacatgtggctgcagaatttacttttcctgggcattgtggtctacagcctctcagcacccacccgctcacccatc

SEQ ID NO: 71 - DNA, 23 bp, Artificial Sequence
  Primer GM-CSF3
gggtcatttttggactggttttt

SEQ ID NO: 72 - DNA, 3910 bp, Artificial Sequence
  pPICZA-mGM-CSF
agatctaacatccaaagacgaaaggttgaatgaaacctttttgccatccgacatccacaggtccattctcacacataagtgccaaacgcaacaggaggggatacactagcagcagaccgttgcaaacgcaggacctccactcctcttctcctcaacacccacttttgccatcgaaaaaccagcccagttattgggcttgattggagctcgctcattccaattccttctattaggctactaacaccatgactttattagcctgtctatcctggcccccctggcgaggttcatgtttgtttatttccgaatgcaacaagctccgcattacacccgaacatcactccagatgagggctttctgagtgtggggtcaaatagtttcatgttccccaaatggcccaaaactgacagtttaaacgctgtcttggaacctaatatgacaaaagcgtgatctcatccaagatgaactaagtttggttcgttgaaatgctaacggccagttggtcaaaaagaaacttccaaaagtcggcataccgtttgtcttgtttggtattgattgacgaatgctcaaaaataatctcattaatgcttagcgcagtctctctatcgcttctgaaccccggtgcacctgtgccgaaacgcaaatggggaaacacccgctttttggatgattatgcattgtctccacattgtatgcttccaagattctggtgggaatactgctgatagcctaacgttcatgatcaaaatttaactgttctaacccctacttgacagcaatatataaacagaaggaagctgccctgtcttaaacctttttttttatcatcattattagcttactttcataattgcgactggttccaattgacaagcttttgattttaacgacttttaacgacaacttgagaagatcaaaaaacaactaattattcgaaacgatgagatttccttcaatttttactgctgttttattcgcagcatcctccgcattagctgctccagtcaacactacaacagaagatgaaacggcacaaattccggctgaagctgtcatcggttactcagatttagaaggggatttcgatgttgctgttttgccattttccaacagcacaaataacgggttattgtttataaatactactattgccagcattgctgctaaagaagaaggggtatctctcgagaaaagagaggctgaagctgaattcgcacccacccgctcacccatcactgtcacccggccttggaagcatgtagaggccatcaaagaagccctgaacctcctggatgacatgcctgtcacattgaatgaagaggtagaagtcgtctctaacgagttctccttcaagaagctaacatgtgtgcagacccgcctgaagatattcgagcagggtctacggggcaatttcaccaaactcaagggcgccttgaacatgacagccagctactaccagacatactgccccccaactccggaaacggactgtgaaacacaagttaccacctatgcggatttcatagacagccttaaaacctttctgactgatatcccctttgaatgcaaaaaaccagtccaaaaaaatctagaacaaaaactcatctcagaagaggatctgaatagcgccgtcgaccatcatcatcatcatcattgagtttgtagccttagacatgactgttcctcagttcaagttgggcacttacgagaagaccggtcttgctagattctaatcaagaggatgtcagaatgccatttgcctgagagatgcaggcttcatttttgatacttttttatttgtaacctatatagtataggattttttttgtcattttgtttcttctcgtacgagcttgctcctgatcagcctatctcgcagctgatgaatatcttgtggtaggggtttgggaaaatcattcgagtttgatgtttttcttggtatttcccactcctcttcagagtacagaagattaagtgagaccttcgtttgtgcggatcccccacacaccatagcttcaaaatgtttctactccttttttactcttccagattttctcggactccgcgcatcgccgtaccacttcaaaacacccaagcacagcatactaaattttccctctttcttcctctagggtgtcgttaattacccgtactaaaggtttggaaaagaaaaaagagaccgcctcgtttctttttcttcgtcgaaaaaggcaataaaaatttttatcacgtttctttttcttgaaatttttttttttagtttttttctctttcagtgacctccattgatatttaagttaataaacggtcttcaatttctcaagtttcagtttcatttttcttgttctattacaactttttttacttcttgttcattagaaagaaagcatagcaatctaatctaaggggcggtgttgacaattaatcatcggcatagtatatcggcatagtataatacgacaaggtgaggaactaaaccatggccaagttgaccagtgccgttccggtgctcaccgcgcgcgacgtcgccggagcggtcgagttctggaccgaccggctcgggttctcccgggacttcgtggaggacgacttcgccggtgtggtccgggacgacgtgaccctgttcatcagcgcggtccaggaccaggtggtgccggacaacaccctggcctgggtgtgggtgcgcggcctggacgagctgtacgccgagtggtcggaggtcgtgtccacgaacttccgggacgcctccgggccggccatgaccgagatcggcgagcagccgtgggggcgggagttcgccctgcgcgacccggccggcaactgcgtgcacttcgtggccgaggagcaggactgacacgtccgacggcggcccacgggtcccaggcctcggagatccgtcccccttttcctttgtcgatatcatgtaattagttatgtcacgcttacattcacgccctccccccacatccgctctaaccgaaaaggaaggagttagacaacctgaagtctaggtccctatttatttttttatagttatgttagtattaagaacgttatttatatttcaaatttttcttttttttctgtacagacgcgtgtacgcatgtaacattatactgaaaaccttgcttgagaaggttttgggacgctcgaaggctttaatttgcaagctggagaccaacatgtgagcaaaaggccagcaaaaggccaggaaccgtaaaaaggccgcgttgctggcgtttttccataggctccgcccccctgacgagcatcacaaaaatcgacgctcaagtcagaggtggcgaaacccgacaggactataaagataccaggcgtttccccctggaagctccctcgtgcgctctcctgttccgaccctgccgcttaccggatacctgtccgcctttctcccttcgggaagcgtggcgctttctcaatgctcacgctgtaggtatctcagttcggtgtaggtcgttcgctccaagctgggctgtgtgcacgaaccccccgttcagcccgaccgctgcgccttatccggtaactatcgtcttgagtccaacccggtaagacacgacttatcgccactggcagcagccactggtaacaggattagcagagcgaggtatgtaggcggtgctacagagttcttgaagtggtggcctaactacggctacactagaaggacagtatttggtatctgcgctctgctgaagccagttaccttcggaaaaagagttggtagctcttgatccggcaaacaaaccaccgctggtagcggtggtttttttgtttgcaagcagcagattacgcgcagaaaaaaaggatctcaagaagatcctttgatcttttctacggggtctgacgctcagtggaacgaaaactcacgttaagggattttggtcatgagatc

SEQ ID NO: 73 - DNA, 5099 bp, Artificial Sequence
  pCRII-IL6-3
  VARIANT 1140: n= unknown
agcgcccaatacgcaaaccgcctctccccgcgcgttggccgattcattaatgcagctggcacgacaggtttcccgactggaaagcgggcagtgagcgcaacgcaattaatgtgagttagctcactcattaggcaccccaggctttacactttatgcttccggctcgtatgttgtgtggaattgtgagcggataacaatttcacacaggaaacagctatgaccatgattacgccaagctatttaggtgacactatagaatactcaagctatgcatcaagcttggtaccgagctcggatccactagtaacggccgccagtgtgctggaattcgcccttggtaccctacatttgccgaagagccctcaggctggactgcaggaactccttaaagctgcgcagaatgagatgagttgtcatgtcctgcagccactggttctgtgcctgcagcttcgtcagcaggctggcatttgtggttgggtcaggggtggttattgcatctagattctttgcctttttctgcaggaactggatcaggacttttgtactcatctgcacagctctggcttgttcctcactactctcaaatctgttctggaggtactctaggtatacctcaaactccaaaagaccagtgatgattttcaccaggcaagtctcctcattgaatccagattggaagcatccatctttttcagccatctttggaaggttcaggttgttttctgccagtgcctctttgctgctttcacacatgttactcttgttacatgtctcctttctcagggctgagatgccgtcgaggatgtaccgaatttgtttgtcaattcgttctgaagaggtgagtggctgtctgtgtggggcggctacatctttggaatcttctcctgggggtactggctcgacagaacctccacctccagaacctccacctcctcgagctggaggactcctggattctgtccaaggcgtgcccatggcctccgggctccactcgctccactcgccttgcccgaactcctcctgggcacgaagctgcaccacgtgcctcaggccgctccaggcgtcgtggatgacacagtgatgctggaggtccttgaccatccatgttgtgaatgtctttgaccgttcagcccgatatcngagctcaaaccgtagtctgtagaaagatgagttccaggagtgggggtcttgccaggtgacactgagccagcgggggtttctggccacggcagtgactgtgatgttggcaggcggatcaggctgcaagattccacaaccctgaaaggtttgagttttgctgaacttgctcccgacactactggcgacgcacatggacactatgtagaaagagctgtctccctccgggactgctaactggcaggagaacttctgggactcctgggaatactggcacggctcctggaagtcttcggccggactgttctgaaacttcctcaccaagagcacagcctttgtcgtcagggatggggtgctccgaggaccccactcacaaacaacattgctgagggggctcttccggaagcaggagagctggggctcctcggggggaacatccaccagcaagtgcacagtcccagctgggcggccggcccggtagcatgaatagtttccagagtcgtggagctgcaccgacctcagcagcagcctccttcccatgccagcccatctgctggggtgggagcctgcagccggcttcctgagcacccagtgaacagtggcattgtcttccggctctacccccgggcaggtcagagtcacgctgtctcctggcagactggtcagcacgcctctcgccacctcctgcgcagggcagcgccttggggccagcgccgctcccggcgcggccagcagggcagccagcagcgcgcagccgacggccagcatggtgggtcgacaagggcgaattctgcagatatccatcacactggcggccgctcgagcatgcatctagagggcccaattcgccctatagtgagtcgtattacaattcactggccgtcgttttacaacgtcgtgactgggaaaaccctggcgttacccaacttaatcgccttgcagcacatccccctttcgccagctggcgtaatagcgaagaggcccgcaccgatcgcccttcccaacagttgcgcagcctatacgtacggcagtttaaggtttacacctataaaagagagagccgttatcgtctgtttgtggatgtacagagtgatattattgacacgccggggcgacggatggtgatccccctggccagtgcacgtctgctgtcagataaagtctcccgtgaactttacccggtggtgcatatcggggatgaaagctggcgcatgatgaccaccgatatggccagtgtgccggtctccgttatcggggaagaagtggctgatctcagccaccgcgaaaatgacatcaaaaacgccattaacctgatgttctggggaatataaatgtcaggcatgagattatcaaaaaggatcttcacctagatccttttcacgtagaaagccagtccgcagaaacggtgctgaccccggatgaatgtcagctactgggctatctggacaagggaaaacgcaagcgcaaagagaaagcaggtagcttgcagtgggcttacatggcgatagctagactgggcggttttatggacagcaagcgaaccggaattgccagctggggcgccctctggtaaggttgggaagccctgcaaagtaaactggatggctttctcgccgccaaggatctgatggcgcaggggatcaagctctgatcaagagacaggatgaggatcgtttcgcatgattgaacaagatggattgcacgcaggttctccggccgcttgggtggagaggctattcggctatgactgggcacaacagacaatcggctgctctgatgccgccgtgttccggctgtcagcgcaggggcgcccggttctttttgtcaagaccgacctgtccggtgccctgaatgaactgcaagacgaggcagcgcggctatcgtggctggccacgacgggcgttccttgcgcagctgtgctcgacgttgtcactgaagcgggaagggactggctgctattgggcgaagtgccggggcaggatctcctgtcatctcaccttgctcctgccgagaaagtatccatcatggctgatgcaatgcggcggctgcatacgcttgatccggctacctgcccattcgaccaccaagcgaaacatcgcatcgagcgagcacgtactcggatggaagccggtcttgtcgatcaggatgatctggacgaagagcatcaggggctcgcgccagccgaactgttcgccaggctcaaggcgagcatgcccgacggcgaggatctcgtcgtgacccatggcgatgcctgcttgccgaatatcatggtggaaaatggccgcttttctggattcatcgactgtggccggctgggtgtggcggaccgctatcaggacatagcgttggctacccgtgatattgctgaagagcttggcggcgaatgggctgaccgcttcctcgtgctttacggtatcgccgctcccgattcgcagcgcatcgccttctatcgccttcttgacgagttcttctgaattattaacgcttacaatttcctgatgcggtattttctccttacgcatctgtgcggtatttcacaccgcatacaggtggcacttttcggggaaatgtgcgcggaacccctatttgtttatttttctaaatacattcaaatatgtatccgctcatgagacaataaccctgataaatgcttcaataatagcacgtgaggagggccaccatggccaagttgaccagtgccgttccggtgctcaccgcgcgcgacgtcgccggagcggtcgagttctggaccgaccggctcgggttctcccgggacttcgtggaggacgacttcgccggtgtggtccgggacgacgtgaccctgttcatcagcgcggtccaggaccaggtggtgccggacaacaccctggcctgggtgtgggtgcgcggcctggacgagctgtacgccgagtggtcggaggtcgtgtccacgaacttccgggacgcctccgggccggccatgaccgagatcggcgagcagccgtgggggcgggagttcgccctgcgcgacccggccggcaactgcgtgcacttcgtggccgaggagcaggactgacacgtgctaaaacttcatttttaatttaaaaggatctaggtgaagatcctttttgataatctcatgaccaaaatcccttaacgtgagttttcgttccactgagcgtcagaccccgtagaaaagatcaaaggatcttcttgagatcctttttttctgcgcgtaatctgctgcttgcaaacaaaaaaaccaccgctaccagcggtggtttgtttgccggatcaagagctaccaactctttttccgaaggtaactggcttcagcagagcgcagataccaaatactgtccttctagtgtagccgtagttaggccaccacttcaagaactctgtagcaccgcctacatacctcgctctgctaatcctgttaccagtggctgctgccagtggcgataagtcgtgtcttaccgggttggactcaagacgatagttaccggataaggcgcagcggtcgggctgaacggggggttcgtgcacacagcccagcttggagcgaacgacctacaccgaactgagatacctacagcgtgagctatgagaaagcgccacgcttcccgaagggagaaaggcggacaggtatccggtaagcggcagggtcggaacaggagagcgcacgagggagcttccagggggaaacgcctggtatctttatagtcctgtcgggtttcgccacctctgacttgagcgtcgatttttgtgatgctcgtcaggggggcggagcctatggaaaaacgccagcaacgcggcctttttacggttcctgggcttttgctggccttttgctcacatgttctttcctgcgttatcccctgattctgtggataaccgtattaccgcctttgagtgagctgataccgctcgccgcagccgaacgaccgagcgcagcgagtcagtgagcgaggaagcggaag

SEQ ID NO: 74 - DNA, 5611 bp, Artificial Sequence
  pCR-SE-IL6-7
  VARIANT 1095: n= unknown
agcgcccaatacgcaaaccgcctctccccgcgcgttggccgattcattaatgcagctggcacgacaggtttcccgactggaaagcgggcagtgagcgcaacgcaattaatgtgagttagctcactcattaggcaccccaggctttacactttatgcttccggctcgtatgttgtgtggaattgtgagcggataacaatttcacacaggaaacagctatgaccatgattacgccaagcttggtaccgagctctccagacattgttgaattagatcgataaaaattaattaattaccccctacatttgccgaagagccctcaggctggactgcaggaactccttaaagctgcgcagaatgagatgagttgtcatgtcctgcagccactggttctgtgcctgcagcttcgtcagcaggctggcatttgtggttgggtcaggggtggttattgcatctagattctttgcctttttctgcaggaactggatcaggacttttgtactcatctgcacagctctggcttgttcctcactactctcaaatctgttctggaggtactctaggtatacctcaaactccaaaagaccagtgatgattttcaccaggcaagtctcctcattgaatccagattggaagcatccatctttttcagccatctttggaaggttcaggttgttttctgccagtgcctctttgctgctttcacacatgttactcttgttacatgtctcctttctcagggctgagatgccgtcgaggatgtaccgaatttgtttgtcaattcgttctgaagaggtgagtggctgtctgtgtggggcggctacatctttggaatcttctcctgggggtactggctcgacagaacctccacctccagaacctccacctcctcgagctggaggactcctggattctgtccaaggcgtgcccatggcctccgggctccactcgctccactcgccttgcccgaactcctcctgggcacgaagctgcaccacgtgcctcaggccgctccaggcgtcgtggatgacacagtgatgctggaggtccttgaccatccatgttgtgaatgtctttgaccgttcagcccgatatcngagctcaaaccgtagtctgtagaaagatgagttccaggagtgggggtcttgccaggtgacactgagccagcgggggtttctggccacggcagtgactgtgatgttggcaggcggatcaggctgcaagattccacaaccctgaaaggtttgagttttgctgaacttgctcccgacactactggcgacgcacatggacactatgtagaaagagctgtctccctccgggactgctaactggcaggagaacttctgggactcctgggaatactggcacggctcctggaagtcttcggccggactgttctgaaacttcctcaccaagagcacagcctttgtcgtcagggatggggtgctccgaggaccccactcacaaacaacattgctgagggggctcttccggaagcaggagagctggggctcctcggggggaacatccaccagcaagtgcacagtcccagctgggcggccggcccggtagcatgaatagtttccagagtcgtggagctgcaccgacctcagcagcagcctccttcccatgccagcccatctgctggggtgggagcctgcagccggcttcctgagcacccagtgaacagtggcattgtcttccggctctacccccgggcaggtcagagtcacgctgtctcctggcagactggtcagcacgcctctcgccacctcctgcgcagggcagcgccttggggccagcgccgctcccggcgcggccagcagggcagccagcagcgcgcagccgacggccagcatggtgggtcgacttcgagcaaaaaaagacgctagtttttcaatttttgagctcggatccttctgtgagcgtatggcagatggtgccaccgtagtgtactagtaacggccgccagtgtgctggaattctgcagatatccatcacactggcggccgctcgagcatgcatctagagggcccaattcgccctatagtgagtcgtattacaattcactggccgtcgttttacaacgtcgtgactgggaaaaccctggcgttacccaacttaatcgccttgcagcacatccccctttcgccagctggcgtaatagcgaagaggcccgcaccgatcgcccttcccaacagttgcgcagcctgaatggcgaatggacgcgccctgtagcggcgcattaagcgcggcgggtgtggtggttacgcgcagcgtgaccgctacacttgccagcgccctagcgcccgctcctttcgctttcttcccttcctttctcgccacgttcgccggctttccccgtcaagctctaaatcgggggctccctttagggttccgatttagtgctttacggcacctcgaccccaaaaaacttgattagggtgatggttcacgtagtgggccatcgccctgatagacggtttttcgccctttgacgttggagtccacgttctttaatagtggactcttgttccaaactggaacaacactcaaccctatctcggtctattcttttgatttataagggattttgccgatttcggcctattggttaaaaaatgagctgatttaacaaaaatttaacgcgaattttaacaaaattcagggcgcaagggctgctaaaggaagcggaacacgtagaaagccagtccgcagaaacggtgctgaccccggatgaatgtcagctactgggctatctggacaagggaaaacgcaagcgcaaagagaaagcaggtagcttgcagtgggcttacatggcgatagctagactgggcggttttatggacagcaagcgaaccggaattgccagctggggcgccctctggtaaggttgggaagccctgcaaagtaaactggatggctttcttgccgccaaggatctgatggcgcaggggatcaagatctgatcaagagacaggatgaggatcgtttcgcatgattgaacaagatggattgcacgcaggttctccggccgcttgggtggagaggctattcggctatgactgggcacaacagacaatcggctgctctgatgccgccgtgttccggctgtcagcgcaggggcgcccggttctttttgtcaagaccgacctgtccggtgccctgaatgaactgcaggacgaggcagcgcggctatcgtggctggccacgacgggcgttccttgcgcagctgtgctcgacgttgtcactgaagcgggaagggactggctgctattgggcgaagtgccggggcaggatctcctgtcatcccaccttgctcctgccgagaaagtatccatcatggctgatgcaatgcggcggctgcatacgcttgatccggctacctgcccattcgaccaccaagcgaaacatcgcatcgagcgagcacgtactcggatggaagccggtcttgtcgatcaggatgatctggacgaagagcatcaggggctcgcgccagccgaactgttcgccaggctcaaggcgcgcatgcccgacggcgaggatctcgtcgtgacccatggcgatgcctgcttgccgaatatcatggtggaaaatggccgcttttctggattcatcgactgtggccggctgggtgtggcggaccgctatcaggacatagcgttggctacccgtgatattgctgaagagcttggcggcgaatgggctgaccgcttcctcgtgctttacggtatcgccgctcccgattcgcagcgcatcgccttctatcgccttcttgacgagttcttctgaattgaaaaaggaagagtatgagtattcaacatttccgtgtcgcccttattcccttttttgcggcattttgccttcctgtttttgctcacccagaaacgctggtgaaagtaaaagatgctgaagatcagttgggtgcacgagtgggttacatcgaactggatctcaacagcggtaagatccttgagagttttcgccccgaagaacgttttccaatgatgagcacttttaaagttctgctatgtggcgcggtattatcccgtattgacgccgggcaagagcaactcggtcgccgcatacactattctcagaatgacttggttgagtactcaccagtcacagaaaagcatcttacggatggcatgacagtaagagaattatgcagtgctgccataaccatgagtgataacactgcggccaacttacttctgacaacgatcggaggaccgaaggagctaaccgcttttttgcacaacatgggggatcatgtaactcgccttgatcgttgggaaccggagctgaatgaagccataccaaacgacgagcgtgacaccacgatgcctgtagcaatggcaacaacgttgcgcaaactattaactggcgaactacttactctagcttcccggcaacaattaatagactggatggaggcggataaagttgcaggaccacttctgcgctcggcccttccggctggctggtttattgctgataaatctggagccggtgagcgtgggtctcgcggtatcattgcagcactggggccagatggtaagccctcccgtatcgtagttatctacacgacggggagtcaggcaactatggatgaacgaaatagacagatcgctgagataggtgcctcactgattaagcattggtaactgtcagaccaagtttactcatatatactttagattgatttaaaacttcatttttaatttaaaaggatctaggtgaagatcctttttgataatctcatgaccaaaatcccttaacgtgagttttcgttccactgagcgtcagaccccgtagaaaagatcaaaggatcttcttgagatcctttttttctgcgcgtaatctgctgcttgcaaacaaaaaaaccaccgctaccagcggtggtttgtttgccggatcaagagctaccaactctttttccgaaggtaactggcttcagcagagcgcagataccaaatactgttcttctagtgtagccgtagttaggccaccacttcaagaactctgtagcaccgcctacatacctcgctctgctaatcctgttaccagtggctgctgccagtggcgataagtcgtgtcttaccgggttggactcaagacgatagttaccggataaggcgcagcggtcgggctgaacggggggttcgtgcacacagcccagcttggagcgaacgacctacaccgaactgagatacctacagcgtgagctatgagaaagcgccacgcttcccgaagggagaaaggcggacaggtatccggtaagcggcagggtcggaacaggagagcgcacgagggagcttccagggggaaacgcctggtatctttatagtcctgtcgggtttcgccacctctgacttgagcgtcgatttttgtgatgctcgtcaggggggcggagcctatggaaaaacgccagcaacgcggcctttttacggttcctggccttttgctggccttttgctcacatgttctttcctgcgttatcccctgattctgtggataaccgtattaccgcctttgagtgagctgataccgctcgccgcagccgaacgaccgagcgcagcgagtcagtgagcgaggaagcggaag

SEQ ID NO: 75 - DNA, 5609 bp, Artificial Sequence
  pCR-SL-IL6-2
  VARIANT 1095: n= unknown
agcgcccaatacgcaaaccgcctctccccgcgcgttggccgattcattaatgcagctggcacgacaggtttcccgactggaaagcgggcagtgagcgcaacgcaattaatgtgagttagctcactcattaggcaccccaggctttacactttatgcttccggctcgtatgttgtgtggaattgtgagcggataacaatttcacacaggaaacagctatgaccatgattacgccaagcttggtaccgagctctccagacattgttgaattagatcgataaaaattaattaattaccccctacatttgccgaagagccctcaggctggactgcaggaactccttaaagctgcgcagaatgagatgagttgtcatgtcctgcagccactggttctgtgcctgcagcttcgtcagcaggctggcatttgtggttgggtcaggggtggttattgcatctagattctttgcctttttctgcaggaactggatcaggacttttgtactcatctgcacagctctggcttgttcctcactactctcaaatctgttctggaggtactctaggtatacctcaaactccaaaagaccagtgatgattttcaccaggcaagtctcctcattgaatccagattggaagcatccatctttttcagccatctttggaaggttcaggttgttttctgccagtgcctctttgctgctttcacacatgttactcttgttacatgtctcctttctcagggctgagatgccgtcgaggatgtaccgaatttgtttgtcaattcgttctgaagaggtgagtggctgtctgtgtggggcggctacatctttggaatcttctcctgggggtactggctcgacagaacctccacctccagaacctccacctcctcgagctggaggactcctggattctgtccaaggcgtgcccatggcctccgggctccactcgctccactcgccttgcccgaactcctcctgggcacgaagctgcaccacgtgcctcaggccgctccaggcgtcgtggatgacacagtgatgctggaggtccttgaccatccatgttgtgaatgtctttgaccgttcagcccgatatcngagctcaaaccgtagtctgtagaaagatgagttccaggagtgggggtcttgccaggtgacactgagccagcgggggtttctggccacggcagtgactgtgatgttggcaggcggatcaggctgcaagattccacaaccctgaaaggtttgagttttgctgaacttgctcccgacactactggcgacgcacatggacactatgtagaaagagctgtctccctccgggactgctaactggcaggagaacttctgggactcctgggaatactggcacggctcctggaagtcttcggccggactgttctgaaacttcctcaccaagagcacagcctttgtcgtcagggatggggtgctccgaggaccccactcacaaacaacattgctgagggggctcttccggaagcaggagagctggggctcctcggggggaacatccaccagcaagtgcacagtcccagctgggcggccggcccggtagcatgaatagtttccagagtcgtggagctgcaccgacctcagcagcagcctccttcccatgccagcccatctgctggggtgggagcctgcagccggcttcctgagcacccagtgaacagtggcattgtcttccggctctacccccgggcaggtcagagtcacgctgtctcctggcagactggtcagcacgcctctcgccacctcctgcgcagggcagcgccttggggccagcgccgctcccggcgcggccagcagggcagccagcagcgcgcagccgacggccagcatggtgggtcgacttatttatatgccaaaaaaaaaaaaaaaaaaaagagctcggatccttctgtgagcgtatggcagatggtgccaccgtagtgtactagtaacggccgccagtgtgctggaattctgcagatatccatcacactggcggccgctcgagcatgcatctagagggcccaattcgccctatagtgagtcgtattacaattcactggccgtcgttttacaacgtcgtgactgggaaaaccctggcgttacccaacttaatcgccttgcagcacatccccctttcgccagctggcgtaatagcgaagaggcccgcaccgatcgcccttcccaacagttgcgcagcctgaatggcgaatggacgcgccctgtagcggcgcattaagcgcggcgggtgtggtggttacgcgcagcgtgaccgctacacttgccagcgccctagcgcccgctcctttcgctttcttcccttcctttctcgccacgttcgccggctttccccgtcaagctctaaatcgggggctccctttagggttccgatttagtgctttacggcacctcgaccccaaaaaacttgattagggtgatggttcacgtagtgggccatcgccctgatagacggtttttcgccctttgacgttggagtccacgttctttaatagtggactcttgttccaaactggaacaacactcaaccctatctcggtctattcttttgatttataagggattttgccgatttcggcctattggttaaaaaatgagctgatttaacaaaaatttaacgcgaattttaacaaaattcagggcgcaagggctgctaaaggaagcggaacacgtagaaagccagtccgcagaaacggtgctgaccccggatgaatgtcagctactgggctatctggacaagggaaaacgcaagcgcaaagagaaagcaggtagcttgcagtgggcttacatggcgatagctagactgggcggttttatggacagcaagcgaaccggaattgccagctggggcgccctctggtaaggttgggaagccctgcaaagtaaactggatggctttcttgccgccaaggatctgatggcgcaggggatcaagatctgatcaagagacaggatgaggatcgtttcgcatgattgaacaagatggattgcacgcaggttctccggccgcttgggtggagaggctattcggctatgactgggcacaacagacaatcggctgctctgatgccgccgtgttccggctgtcagcgcaggggcgcccggttctttttgtcaagaccgacctgtccggtgccctgaatgaactgcaggacgaggcagcgcggctatcgtggctggccacgacgggcgttccttgcgcagctgtgctcgacgttgtcactgaagcgggaagggactggctgctattgggcgaagtgccggggcaggatctcctgtcatcccaccttgctcctgccgagaaagtatccatcatggctgatgcaatgcggcggctgcatacgcttgatccggctacctgcccattcgaccaccaagcgaaacatcgcatcgagcgagcacgtactcggatggaagccggtcttgtcgatcaggatgatctggacgaagagcatcaggggctcgcgccagccgaactgttcgccaggctcaaggcgcgcatgcccgacggcgaggatctcgtcgtgacccatggcgatgcctgcttgccgaatatcatggtggaaaatggccgcttttctggattcatcgactgtggccggctgggtgtggcggaccgctatcaggacatagcgttggctacccgtgatattgctgaagagcttggcggcgaatgggctgaccgcttcctcgtgctttacggtatcgccgctcccgattcgcagcgcatcgccttctatcgccttcttgacgagttcttctgaattgaaaaaggaagagtatgagtattcaacatttccgtgtcgcccttattcccttttttgcggcattttgccttcctgtttttgctcacccagaaacgctggtgaaagtaaaagatgctgaagatcagttgggtgcacgagtgggttacatcgaactggatctcaacagcggtaagatccttgagagttttcgccccgaagaacgttttccaatgatgagcacttttaaagttctgctatgtggcgcggtattatcccgtattgacgccgggcaagagcaactcggtcgccgcatacactattctcagaatgacttggttgagtactcaccagtcacagaaaagcatcttacggatggcatgacagtaagagaattatgcagtgctgccataaccatgagtgataacactgcggccaacttacttctgacaacgatcggaggaccgaaggagctaaccgcttttttgcacaacatgggggatcatgtaactcgccttgatcgttgggaaccggagctgaatgaagccataccaaacgacgagcgtgacaccacgatgcctgtagcaatggcaacaacgttgcgcaaactattaactggcgaactacttactctagcttcccggcaacaattaatagactggatggaggcggataaagttgcaggaccacttctgcgctcggcccttccggctggctggtttattgctgataaatctggagccggtgagcgtgggtctcgcggtatcattgcagcactggggccagatggtaagccctcccgtatcgtagttatctacacgacggggagtcaggcaactatggatgaacgaaatagacagatcgctgagataggtgcctcactgattaagcattggtaactgtcagaccaagtttactcatatatactttagattgatttaaaacttcatttttaatttaaaaggatctaggtgaagatcctttttgataatctcatgaccaaaatcccttaacgtgagttttcgttccactgagcgtcagaccccgtagaaaagatcaaaggatcttcttgagatcctttttttctgcgcgtaatctgctgcttgcaaacaaaaaaaccaccgctaccagcggtggtttgtttgccggatcaagagctaccaactctttttccgaaggtaactggcttcagcagagcgcagataccaaatactgttcttctagtgtagccgtagttaggccaccacttcaagaactctgtagcaccgcctacatacctcgctctgctaatcctgttaccagtggctgctgccagtggcgataagtcgtgtcttaccgggttggactcaagacgatagttaccggataaggcgcagcggtcgggctgaacggggggttcgtgcacacagcccagcttggagcgaacgacctacaccgaactgagatacctacagcgtgagctatgagaaagcgccacgcttcccgaagggagaaaggcggacaggtatccggtaagcggcagggtcggaacaggagagcgcacgagggagcttccagggggaaacgcctggtatctttatagtcctgtcgggtttcgccacctctgacttgagcgtcgatttttgtgatgctcgtcaggggggcggagcctatggaaaaacgccagcaacgcggcctttttacggttcctggccttttgctggccttttgctcacatgttctttcctgcgttatcccctgattctgtggataaccgtattaccgcctttgagtgagctgataccgctcgccgcagccgaacgaccgagcgcagcgagtcagtgagcgaggaagcggaag

SEQ ID NO: 76 - DNA, 5645 bp, Artificial Sequence
  pCR-SEL-IL6-2
  VARIANT 1095: n= unknown
agcgcccaatacgcaaaccgcctctccccgcgcgttggccgattcattaatgcagctggcacgacaggtttcccgactggaaagcgggcagtgagcgcaacgcaattaatgtgagttagctcactcattaggcaccccaggctttacactttatgcttccggctcgtatgttgtgtggaattgtgagcggataacaatttcacacaggaaacagctatgaccatgattacgccaagcttggtaccgagctctccagacattgttgaattagatcgataaaaattaattaattaccccctacatttgccgaagagccctcaggctggactgcaggaactccttaaagctgcgcagaatgagatgagttgtcatgtcctgcagccactggttctgtgcctgcagcttcgtcagcaggctggcatttgtggttgggtcaggggtggttattgcatctagattctttgcctttttctgcaggaactggatcaggacttttgtactcatctgcacagctctggcttgttcctcactactctcaaatctgttctggaggtactctaggtatacctcaaactccaaaagaccagtgatgattttcaccaggcaagtctcctcattgaatccagattggaagcatccatctttttcagccatctttggaaggttcaggttgttttctgccagtgcctctttgctgctttcacacatgttactcttgttacatgtctcctttctcagggctgagatgccgtcgaggatgtaccgaatttgtttgtcaattcgttctgaagaggtgagtggctgtctgtgtggggcggctacatctttggaatcttctcctgggggtactggctcgacagaacctccacctccagaacctccacctcctcgagctggaggactcctggattctgtccaaggcgtgcccatggcctccgggctccactcgctccactcgccttgcccgaactcctcctgggcacgaagctgcaccacgtgcctcaggccgctccaggcgtcgtggatgacacagtgatgctggaggtccttgaccatccatgttgtgaatgtctttgaccgttcagcccgatatcngagctcaaaccgtagtctgtagaaagatgagttccaggagtgggggtcttgccaggtgacactgagccagcgggggtttctggccacggcagtgactgtgatgttggcaggcggatcaggctgcaagattccacaaccctgaaaggtttgagttttgctgaacttgctcccgacactactggcgacgcacatggacactatgtagaaagagctgtctccctccgggactgctaactggcaggagaacttctgggactcctgggaatactggcacggctcctggaagtcttcggccggactgttctgaaacttcctcaccaagagcacagcctttgtcgtcagggatggggtgctccgaggaccccactcacaaacaacattgctgagggggctcttccggaagcaggagagctggggctcctcggggggaacatccaccagcaagtgcacagtcccagctgggcggccggcccggtagcatgaatagtttccagagtcgtggagctgcaccgacctcagcagcagcctccttcccatgccagcccatctgctggggtgggagcctgcagccggcttcctgagcacccagtgaacagtggcattgtcttccggctctacccccgggcaggtcagagtcacgctgtctcctggcagactggtcagcacgcctctcgccacctcctgcgcagggcagcgccttggggccagcgccgctcccggcgcggccagcagggcagccagcagcgcgcagccgacggccagcatggtgggtcgacttcgagcttatttatattccaaaaaaaaaaaataaaatttcaatttttaagctttcactaattccaaaccgagctcggatccttctgtgagcgtatggcagatggtgccaccgtagtgtactagtaacggccgccagtgtgctgaattctgcagatatccatcacactggcggccgctcgagcatgcatctagagggcccaattcgccctatagtgagtcgtattacaattcactggccgtcgttttacaacgtcgtgactgggaaaaccctggcgttacccaacttaatcgccttgcagcacatccccctttcgccagctggcgtaatagcgaagaggcccgcaccgatcgcccttcccaacagttgcgcagcctgaatggcgaatggacgcgccctgtagcggcgcattaagcgcggcgggtgtggtggttacgcgcagcgtgaccgctacacttgccagcgccctagcgcccgctcctttcgctttcttcccttcctttctcgccacgttcgccggctttccccgtcaagctctaaatcgggggctccctttagggttccgatttagtgctttacggcacctcgaccccaaaaaacttgattagggtgatggttcacgtagtgggccatcgccctgatagacggtttttcgccctttgacgttggagtccacgttctttaatagtggactcttgttccaaactggaacaacactcaaccctatctcggtctattcttttgatttataagggattttgccgatttcggcctattggttaaaaaatgagctgatttaacaaaaatttaacgcgaattttaacaaaattcagggcgcaagggctgctaaaggaagcggaacacgtagaaagccagtccgcagaaacggtgctgaccccggatgaatgtcagctactgggctatctggacaagggaaaacgcaagcgcaaagagaaagcaggtagcttgcagtgggcttacatggcgatagctagactgggcggttttatggacagcaagcgaaccggaattgccagctggggcgccctctggtaaggttgggaagccctgcaaagtaaactggatggctttcttgccgccaaggatctgatggcgcaggggatcaagatctgatcaagagacaggatgaggatcgtttcgcatgattgaacaagatggattgcacgcaggttctccggccgcttgggtggagaggctattcggctatgactgggcacaacagacaatcggctgctctgatgccgccgtgttccggctgtcagcgcaggggcgcccggttctttttgtcaagaccgacctgtccggtgccctgaatgaactgcaggacgaggcagcgcggctatcgtggctggccacgacgggcgttccttgcgcagctgtgctcgacgttgtcactgaagcgggaagggactggctgctattgggcgaagtgccggggcaggatctcctgtcatcccaccttgctcctgccgagaaagtatccatcatggctgatgcaatgcggcggctgcatacgcttgatccggctacctgcccattcgaccaccaagcgaaacatcgcatcgagcgagcacgtactcggatggaagccggtcttgtcgatcaggatgatctggacgaagagcatcaggggctcgcgccagccgaactgttcgccaggctcaaggcgcgcatgcccgacggcgaggatctcgtcgtgacccatggcgatgcctgcttgccgaatatcatggtggaaaatggccgcttttctggattcatcgactgtggccggctgggtgtggcggaccgctatcaggacatagcgttggctacccgtgatattgctgaagagcttggcggcgaatgggctgaccgcttcctcgtgctttacggtatcgccgctcccgattcgcagcgcatcgccttctatcgccttcttgacgagttcttctgaattgaaaaaggaagagtatgagtattcaacatttccgtgtcgcccttattcccttttttgcggcattttgccttcctgtttttgctcacccagaaacgctggtgaaagtaaaagatgctgaagatcagttgggtgcacgagtgggttacatcgaactggatctcaacagcggtaagatccttgagagttttcgccccgaagaacgttttccaatgatgagcacttttaaagttctgctatgtggcgcggtattatcccgtattgacgccgggcaagagcaactcggtcgccgcatacactattctcagaatgacttggttgagtactcaccagtcacagaaaagcatcttacggatggcatgacagtaagagaattatgcagtgctgccataaccatgagtgataacactgcggccaacttacttctgacaacgatcggaggaccgaaggagctaaccgcttttttgcacaacatgggggatcatgtaactcgccttgatcgttgggaaccggagctgaatgaagccataccaaacgacgagcgtgacaccacgatgcctgtagcaatggcaacaacgttgcgcaaactattaactggcgaactacttactctagcttcccggcaacaattaatagactggatggaggcggataaagttgcaggaccacttctgcgctcggcccttccggctggctggtttattgctgataaatctggagccggtgagcgtgggtctcgcggtatcattgcagcactggggccagatggtaagccctcccgtatcgtagttatctacacgacggggagtcaggcaactatggatgaacgaaatagacagatcgctgagataggtgcctcactgattaagcattggtaactgtcagaccaagtttactcatatatactttagattgatttaaaacttcatttttaatttaaaaggatctaggtgaagatcctttttgataatctcatgaccaaaatcccttaacgtgagttttcgttccactgagcgtcagaccccgtagaaaagatcaaaggatcttcttgagatcctttttttctgcgcgtaatctgctgcttgcaaacaaaaaaaccaccgctaccagcggtggtttgtttgccggatcaagagctaccaactctttttccgaaggtaactggcttcagcagagcgcagataccaaatactgttcttctagtgtagccgtagttaggccaccacttcaagaactctgtagcaccgcctacatacctcgctctgctaatcctgttaccagtggctgctgccagtggcgataagtcgtgtcttaccgggttggactcaagacgatagttaccggataaggcgcagcggtcgggctgaacggggggttcgtgcacacagcccagcttggagcgaacgacctacaccgaactgagatacctacagcgtgagctatgagaaagcgccacgcttcccgaagggagaaaggcggacaggtatccggtaagcggcagggtcggaacaggagagcgcacgagggagcttccagggggaaacgcctggtatctttatagtcctgtcgggtttcgccacctctgacttgagcgtcgatttttgtgatgctcgtcaggggggcggagcctatggaaaaacgccagcaacgcggcctttttacggttcctggccttttgctggccttttgctcacatgttctttcctgcgttatcccctgattctgtggataaccgtattaccgcctttgagtgagctgataccgctcgccgcagccgaacgaccgagcgcagcgagtcagtgagcgaggaagcggaag

SEQ ID NO: 77 - DNA, 5481 bp, Artificial Sequence
  HA-SE-IL6-1
  VARIANT 1622: n= unknown
gacgtctaagaaaccattattatcatgacattaacctataaaaataggcgtatcacgaggccctttcgtctcgcgcgtttcggtgatgacggtgaaaacctctgacacatgcagctcccggagacggtcacagcttgtctgtaagcggatgccgggagcagacaagcccgtcagggcgcgtcagcgggtgttggcgggtgtcggggctggcttaactatgcggcatcagagcagattgtactgagagtgcaccatatgacacgattaccaatacttttgttactaatatcattagtatacgctacaccttttcctcagacatctaaaaaaataggtgatgatgcaactctatcatgtaatcgaaataatacaaatgactacgttgttatgagtgcttggtataaggagcccaattccattattcttttagctgctaaaagcgacgtcttgtattttgataattataccaaggataaaatatcttacgactctccatacgatgatctagttacaactatcacaattaaatcattgactgctagagatgccggtacttatgtatgtgcattctttatgacatcgcctacaaatgacactgataaagtagattatgaagaatactccacagagttgattgtaaatacagatagtgaatcgactatagacataatactatctggatctacacattcaccggaaactagttctgagaaacctgattatatagataattctaattgctcgtcggtattcgaaatctaagcttggtaccgagctctccagacattgttgaattagatcgataaaaattaattaattaccccctacatttgccgaagagccctcaggctggactgcaggaactccttaaagctgcgcagaatgagatgagttgtcatgtcctgcagccactggttctgtgcctgcagcttcgtcagcaggctggcatttgtggttgggtcaggggtggttattgcatctagattctttgcctttttctgcaggaactggatcaggacttttgtactcatctgcacagctctggcttgttcctcactactctcaaatctgttctggaggtactctaggtatacctcaaactccaaaagaccagtgatgattttcaccaggcaagtctcctcattgaatccagattggaagcatccatctttttcagccatctttggaaggttcaggttgttttctgccagtgcctctttgctgctttcacacatgttactcttgttacatgtctcctttctcagggctgagatgccgtcgaggatgtaccgaatttgtttgtcaattcgttctgaagaggtgagtggctgtctgtgtggggcggctacatctttggaatcttctcctgggggtactggctcgacagaacctccacctccagaacctccacctcctcgagctggaggactcctggattctgtccaaggcgtgcccatggcctccgggctccactcgctccactcgccttgcccgaactcctcctgggcacgaagctgcaccacgtgcctcaggccgctccaggcgtcgtggatgacacagtgatgctggaggtccttgaccatccatgttgtgaatgtctttgaccgttcagcccgatatcngagctcaaaccgtagtctgtagaaagatgagttccaggagtgggggtcttgccaggtgacactgagccagcgggggtttctggccacggcagtgactgtgatgttggcaggcggatcaggctgcaagattccacaaccctgaaaggtttgagttttgctgaacttgctcccgacactactggcgacgcacatggacactatgtagaaagagctgtctccctccgggactgctaactggcaggagaacttctgggactcctgggaatactggcacggctcctggaagtcttcggccggactgttctgaaacttcctcaccaagagcacagcctttgtcgtcagggatggggtgctccgaggaccccactcacaaacaacattgctgagggggctcttccggaagcaggagagctggggctcctcggggggaacatccaccagcaagtgcacagtcccagctgggcggccggcccggtagcatgaatagtttccagagtcgtggagctgcaccgacctcagcagcagcctccttcccatgccagcccatctgctggggtgggagcctgcagccggcttcctgagcacccagtgaacagtggcattgtcttccggctctacccccgggcaggtcagagtcacgctgtctcctggcagactggtcagcacgcctctcgccacctcctgcgcagggcagcgccttggggccagcgccgctcccggcgcggccagcagggcagccagcagcgcgcagccgacggccagcatggtgggtcgacttcgagcaaaaaaagacgctagtttttcaatttttgagctcggatcccgactccggaaccaattactgataaagaagaagatcatacagttacagacactgtctcatacactacagtaagtacatcatctggaattgtcactactaaatcaaccaccgatgatacgtacaatgataatgatacagtaccaccaactactgtaggcggtagtacaacctctattagcaattataaaaccaaggactttgtagaaatatttggtattaccgcattaattatattgtcggccgtggcaatattctgtattacgtattatatatgtaataaacgttcacgtaaatacaaaacagagaacaaagtctagatttttgacttacataaatgtctgggatagtaaaatctatcagaattctagaaaagtagaaaatatattctaatttattgcacgggatgagcgaaaaatacatcgtcacctgggacatgttgcagatccatgcacgtaaactcgcaagccgactgatgccttctgaacaatggaaaggcattattgccgtaagccgtggcggtctggtaccgggtgcgttactggcgcgtgaactgggtattcgtcatgtcgataccgtttgtatttccagctacgatcacgacaaccagcgcgagcttaaagtgctgaaacgcgcagaaggcgatggcgaaggcttcatcgttattgatgacctggtggataccggtggtactgcggttgcgattcgtgaaatgtatccaaaagcgcactttgtcaccatcttcgcaaaaccggctggtcgtccgctggttgatgactatgttgttgatatcccgcaagatacctggattgaacagccgtgggatatgggcgtcgtattcgtcccgccaatctccggtcgctaaggatcagcttggcgtaatcatggtcatagctgtttcctgtgtgaaattgttatccgctcacaattccacacaacatacgagccggaagcataaagtgtaaagcctggggtgcctaatgagtgagctaactcacattaattgcgttgcgctcactgcccgctttccagtcgggaaacctgtcgtgccagctgcattaatgaatcggccaacgcgcggggagaggcggtttgcgtattgggcgctcttccgcttcctcgctcactgactcgctgcgctcggtcgttcggctgcggcgagcggtatcagctcactcaaaggcggtaatacggttatccacagaatcaggggataacgcaggaaagaacatgtgagcaaaaggccagcaaaaggccaggaaccgtaaaaaggccgcgttgctggcgtttttccataggctccgcccccctgacgagcatcacaaaaatcgacgctcaagtcagaggtggcgaaacccgacaggactataaagataccaggcgtttccccctggaagctccctcgtgcgctctcctgttccgaccctgccgcttaccggatacctgtccgcctttctcccttcgggaagcgtggcgctttctcatagctcacgctgtaggtatctcagttcggtgtaggtcgttcgctccaagctgggctgtgtgcacgaaccccccgttcagcccgaccgctgcgccttatccggtaactatcgtcttgagtccaacccggtaagacacgacttatcgccactggcagcagccactggtaacaggattagcagagcgaggtatgtaggcggtgctacagagttcttgaagtggtggcctaactacggctacactagaaggacagtatttggtatctgcgctctgctgaagccagttaccttcggaaaaagagttggtagctcttgatccggcaaacaaaccaccgctggtagcggtggtttttttgtttgcaagcagcagattacgcgcagaaaaaaaggatctcaagaagatcctttgatcttttctacggggtctgacgctcagtggaacgaaaactcacgttaagggattttggtcatgagattatcaaaaaggatcttcacctagatccttttaaattaaaaatgaagttttaaatcaatctaaagtatatatgagtaaacttggtctgacagttaccaatgcttaatcagtgaggcacctatctcagcgatctgtctatttcgttcatccatagttgcctgactccccgtcgtgtagataactacgatacgggagggcttaccatctggccccagtgctgcaatgataccgcgagacccacgctcaccggctccagatttatcagcaataaaccagccagccggaagggccgagcgcagaagtggtcctgcaactttatccgcctccatccagtctattaattgttgccgggaagctagagtaagtagttcgccagttaatagtttgcgcaacgttgttgccattgctacaggcatcgtggtgtcacgctcgtcgtttggtatggcttcattcagctccggttcccaacgatcaaggcgagttacatgatcccccatgttgtgcaaaaaagcggttagctccttcggtcctccgatcgttgtcagaagtaagttggccgcagtgttatcactcatggttatggcagcactgcataattctcttactgtcatgccatccgtaagatgcttttctgtgactggtgagtactcaaccaagtcattctgagaatagtgtatgcggcgaccgagttgctcttgcccggcgtcaatacgggataataccgcgccacatagcagaactttaaaagtgctcatcattggaaaacgttcttcggggcgaaaactctcaaggatcttaccgctgttgagatccagttcgatgtaacccactcgtgcacccaactgatcttcagcatcttttactttcaccagcgtttctgggtgagcaaaaacaggaaggcaaaatgccgcaaaaaagggaataagggcgacacggaaatgttgaatactcatactcttcctttttcaatattattgaagcatttatcagggttattgtctcatgagcggatacatatttgaatgtatttagaaaaataaacaaataggggttccgcgcacatttccccgaaaagtgccacct

SEQ ID NO: 78 - DNA, 5479 bp, Artificial Sequence
  HA-SL-IL6-1
  VARIANT 1622: n= unknown
gacgtctaagaaaccattattatcatgacattaacctataaaaataggcgtatcacgaggccctttcgtctcgcgcgtttcggtgatgacggtgaaaacctctgacacatgcagctcccggagacggtcacagcttgtctgtaagcggatgccgggagcagacaagcccgtcagggcgcgtcagcgggtgttggcgggtgtcggggctggcttaactatgcggcatcagagcagattgtactgagagtgcaccatatgacacgattaccaatacttttgttactaatatcattagtatacgctacaccttttcctcagacatctaaaaaaataggtgatgatgcaactctatcatgtaatcgaaataatacaaatgactacgttgttatgagtgcttggtataaggagcccaattccattattcttttagctgctaaaagcgacgtcttgtattttgataattataccaaggataaaatatcttacgactctccatacgatgatctagttacaactatcacaattaaatcattgactgctagagatgccggtacttatgtatgtgcattctttatgacatcgcctacaaatgacactgataaagtagattatgaagaatactccacagagttgattgtaaatacagatagtgaatcgactatagacataatactatctggatctacacattcaccggaaactagttctgagaaacctgattatatagataattctaattgctcgtcggtattcgaaatctaagcttggtaccgagctctccagacattgttgaattagatcgataaaaattaattaattaccccctacatttgccgaagagccctcaggctggactgcaggaactccttaaagctgcgcagaatgagatgagttgtcatgtcctgcagccactggttctgtgcctgcagcttcgtcagcaggctggcatttgtggttgggtcaggggtggttattgcatctagattctttgcctttttctgcaggaactggatcaggacttttgtactcatctgcacagctctggcttgttcctcactactctcaaatctgttctggaggtactctaggtatacctcaaactccaaaagaccagtgatgattttcaccaggcaagtctcctcattgaatccagattggaagcatccatctttttcagccatctttggaaggttcaggttgttttctgccagtgcctctttgctgctttcacacatgttactcttgttacatgtctcctttctcagggctgagatgccgtcgaggatgtaccgaatttgtttgtcaattcgttctgaagaggtgagtggctgtctgtgtggggcggctacatctttggaatcttctcctgggggtactggctcgacagaacctccacctccagaacctccacctcctcgagctggaggactcctggattctgtccaaggcgtgcccatggcctccgggctccactcgctccactcgccttgcccgaactcctcctgggcacgaagctgcaccacgtgcctcaggccgctccaggcgtcgtggatgacacagtgatgctggaggtccttgaccatccatgttgtgaatgtctttgaccgttcagcccgatatcngagctcaaaccgtagtctgtagaaagatgagttccaggagtgggggtcttgccaggtgacactgagccagcgggggtttctggccacggcagtgactgtgatgttggcaggcggatcaggctgcaagattccacaaccctgaaaggtttgagttttgctgaacttgctcccgacactactggcgacgcacatggacactatgtagaaagagctgtctccctccgggactgctaactggcaggagaacttctgggactcctgggaatactggcacggctcctggaagtcttcggccggactgttctgaaacttcctcaccaagagcacagcctttgtcgtcagggatggggtgctccgaggaccccactcacaaacaacattgctgagggggctcttccggaagcaggagagctggggctcctcggggggaacatccaccagcaagtgcacagtcccagctgggcggccggcccggtagcatgaatagtttccagagtcgtggagctgcaccgacctcagcagcagcctccttcccatgccagcccatctgctggggtgggagcctgcagccggcttcctgagcacccagtgaacagtggcattgtcttccggctctacccccgggcaggtcagagtcacgctgtctcctggcagactggtcagcacgcctctcgccacctcctgcgcagggcagcgccttggggccagcgccgctcccggcgcggccagcagggcagccagcagcgcgcagccgacggccagcatggtgggtcgacttatttatatgccaaaaaaaaaaaaaaaaaaaagagctcggatcccgactccggaaccaattactgataaagaagaagatcatacagttacagacactgtctcatacactacagtaagtacatcatctggaattgtcactactaaatcaaccaccgatgatacgtacaatgataatgatacagtaccaccaactactgtaggcggtagtacaacctctattagcaattataaaaccaaggactttgtagaaatatttggtattaccgcattaattatattgtcggccgtggcaatattctgtattacgtattatatatgtaataaacgttcacgtaaatacaaaacagagaacaaagtctagatttttgacttacataaatgtctgggatagtaaaatctatcagaattctagaaaagtagaaaatatattctaatttattgcacgggatgagcgaaaaatacatcgtcacctgggacatgttgcagatccatgcacgtaaactcgcaagccgactgatgccttctgaacaatggaaaggcattattgccgtaagccgtggcggtctggtaccgggtgcgttactggcgcgtgaactgggtattcgtcatgtcgataccgtttgtatttccagctacgatcacgacaaccagcgcgagcttaaagtgctgaaacgcgcagaaggcgatggcgaaggcttcatcgttattgatgacctggtggataccggtggtactgcggttgcgattcgtgaaatgtatccaaaagcgcactttgtcaccatcttcgcaaaaccggctggtcgtccgctggttgatgactatgttgttgatatcccgcaagatacctggattgaacagccgtgggatatgggcgtcgtattcgtcccgccaatctccggtcgctaaggatcagcttggcgtaatcatggtcatagctgtttcctgtgtgaaattgttatccgctcacaattccacacaacatacgagccggaagcataaagtgtaaagcctggggtgcctaatgagtgagctaactcacattaattgcgttgcgctcactgcccgctttccagtcgggaaacctgtcgtgccagctgcattaatgaatcggccaacgcgcggggagaggcggtttgcgtattgggcgctcttccgcttcctcgctcactgactcgctgcgctcggtcgttcggctgcggcgagcggtatcagctcactcaaaggcggtaatacggttatccacagaatcaggggataacgcaggaaagaacatgtgagcaaaaggccagcaaaaggccaggaaccgtaaaaaggccgcgttgctggcgtttttccataggctccgcccccctgacgagcatcacaaaaatcgacgctcaagtcagaggtggcgaaacccgacaggactataaagataccaggcgtttccccctggaagctccctcgtgcgctctcctgttccgaccctgccgcttaccggatacctgtccgcctttctcccttcgggaagcgtggcgctttctcatagctcacgctgtaggtatctcagttcggtgtaggtcgttcgctccaagctgggctgtgtgcacgaaccccccgttcagcccgaccgctgcgccttatccggtaactatcgtcttgagtccaacccggtaagacacgacttatcgccactggcagcagccactggtaacaggattagcagagcgaggtatgtaggcggtgctacagagttcttgaagtggtggcctaactacggctacactagaaggacagtatttggtatctgcgctctgctgaagccagttaccttcggaaaaagagttggtagctcttgatccggcaaacaaaccaccgctggtagcggtggtttttttgtttgcaagcagcagattacgcgcagaaaaaaaggatctcaagaagatcctttgatcttttctacggggtctgacgctcagtggaacgaaaactcacgttaagggattttggtcatgagattatcaaaaaggatcttcacctagatccttttaaattaaaaatgaagttttaaatcaatctaaagtatatatgagtaaacttggtctgacagttaccaatgcttaatcagtgaggcacctatctcagcgatctgtctatttcgttcatccatagttgcctgactccccgtcgtgtagataactacgatacgggagggcttaccatctggccccagtgctgcaatgataccgcgagacccacgctcaccggctccagatttatcagcaataaaccagccagccggaagggccgagcgcagaagtggtcctgcaactttatccgcctccatccagtctattaattgttgccgggaagctagagtaagtagttcgccagttaatagtttgcgcaacgttgttgccattgctacaggcatcgtggtgtcacgctcgtcgtttggtatggcttcattcagctccggttcccaacgatcaaggcgagttacatgatcccccatgttgtgcaaaaaagcggttagctccttcggtcctccgatcgttgtcagaagtaagttggccgcagtgttatcactcatggttatggcagcactgcataattctcttactgtcatgccatccgtaagatgcttttctgtgactggtgagtactcaaccaagtcattctgagaatagtgtatgcggcgaccgagttgctcttgcccggcgtcaatacgggataataccgcgccacatagcagaactttaaaagtgctcatcattggaaaacgttcttcggggcgaaaactctcaaggatcttaccgctgttgagatccagttcgatgtaacccactcgtgcacccaactgatcttcagcatcttttactttcaccagcgtttctgggtgagcaaaaacaggaaggcaaaatgccgcaaaaaagggaataagggcgacacggaaatgttgaatactcatactcttcctttttcaatattattgaagcatttatcagggttattgtctcatgagcggatacatatttgaatgtatttagaaaaataaacaaataggggttccgcgcacatttccccgaaaagtgccacct

SEQ ID NO: 79 - DNA, 5498 bp, Artificial Sequence
  HA-SEL-IL6-1
  VARIANT 1622: n= unknown
gacgtctaagaaaccattattatcatgacattaacctataaaaataggcgtatcacgaggccctttcgtctcgcgcgtttcggtgatgacggtgaaaacctctgacacatgcagctcccggagacggtcacagcttgtctgtaagcggatgccgggagcagacaagcccgtcagggcgcgtcagcgggtgttggcgggtgtcggggctggcttaactatgcggcatcagagcagattgtactgagagtgcaccatatgacacgattaccaatacttttgttactaatatcattagtatacgctacaccttttcctcagacatctaaaaaaataggtgatgatgcaactctatcatgtaatcgaaataatacaaatgactacgttgttatgagtgcttggtataaggagcccaattccattattcttttagctgctaaaagcgacgtcttgtattttgataattataccaaggataaaatatcttacgactctccatacgatgatctagttacaactatcacaattaaatcattgactgctagagatgccggtacttatgtatgtgcattctttatgacatcgcctacaaatgacactgataaagtagattatgaagaatactccacagagttgattgtaaatacagatagtgaatcgactatagacataatactatctggatctacacattcaccggaaactagttctgagaaacctgattatatagataattctaattgctcgtcggtattcgaaatctaagcttggtaccgagctctccagacattgttgaattagatcgataaaaattaattaattaccccctacatttgccgaagagccctcaggctggactgcaggaactccttaaagctgcgcagaatgagatgagttgtcatgtcctgcagccactggttctgtgcctgcagcttcgtcagcaggctggcatttgtggttgggtcaggggtggttattgcatctagattctttgcctttttctgcaggaactggatcaggacttttgtactcatctgcacagctctggcttgttcctcactactctcaaatctgttctggaggtactctaggtatacctcaaactccaaaagaccagtgatgattttcaccaggcaagtctcctcattgaatccagattggaagcatccatctttttcagccatctttggaaggttcaggttgttttctgccagtgcctctttgctgctttcacacatgttactcttgttacatgtctcctttctcagggctgagatgccgtcgaggatgtaccgaatttgtttgtcaattcgttctgaagaggtgagtggctgtctgtgtggggcggctacatctttggaatcttctcctgggggtactggctcgacagaacctccacctccagaacctccacctcctcgagctggaggactcctggattctgtccaaggcgtgcccatggcctccgggctccactcgctccactcgccttgcccgaactcctcctgggcacgaagctgcaccacgtgcctcaggccgctccaggcgtcgtggatgacacagtgatgctggaggtccttgaccatccatgttgtgaatgtctttgaccgttcagcccgatatcngagctcaaaccgtagtctgtagaaagatgagttccaggagtgggggtcttgccaggtgacactgagccagcgggggtttctggccacggcagtgactgtgatgttggcaggcggatcaggctgcaagattccacaaccctgaaaggtttgagttttgctgaacttgctcccgacactactggcgacgcacatggacactatgtagaaagagctgtctccctccgggactgctaactggcaggagaacttctgggactcctgggaatactggcacggctcctggaagtcttcggccggactgttctgaaacttcctcaccaagagcacagcctttgtcgtcagggatggggtgctccgaggaccccactcacaaacaacattgctgagggggctcttccggaagcaggagagctggggctcctcggggggaacatccaccagcaagtgcacagtcccagctgggcggccggcccggtagcatgaatagtttccagagtcgtggagctgcaccgacctcagcagcagcctccttcccatgccagcccatctgctggggtgggagcctgcagccggcttcctgagcacccagtgaacagtggcattgtcttccggctctacccccgggcaggtcagagtcacgctgtctcctggcagactggtcagcacgcctctcgccacctcctgcgcagggcagcgccttggggccagcgccgctcccggcgcggccagcagggcagccagcagcgcgcagccgacggccagcatggtgggtcgacttcgagcttatttatattccaaaaaaaaaaaataaaatttcaatttttaagcttcgcaggatcccgactccggaaccaattactgataaagaagaagatcatacagttacagacactgtctcatacactacagtaagtacatcatctggaattgtcactactaaatcaaccaccgatgatacgtacaatgataatgatacagtaccaccaactactgtaggcggtagtacaacctctattagcaattataaaaccaaggactttgtagaaatatttggtattaccgcattaattatattgtcggccgtggcaatattctgtattacgtattatatatgtaataaacgttcacgtaaatacaaaacagagaacaaagtctagatttttgacttacataaatgtctgggatagtaaaatctatcagaattctagaaaagtagaaaatatattctaatttattgcacgggatgagcgaaaaatacatcgtcacctgggacatgttgcagatccatgcacgtaaactcgcaagccgactgatgccttctgaacaatggaaaggcattattgccgtaagccgtggcggtctggtaccgggtgcgttactggcgcgtgaactgggtattcgtcatgtcgataccgtttgtatttccagctacgatcacgacaaccagcgcgagcttaaagtgctgaaacgcgcagaaggcgatggcgaaggcttcatcgttattgatgacctggtggataccggtggtactgcggttgcgattcgtgaaatgtatccaaaagcgcactttgtcaccatcttcgcaaaaccggctggtcgtccgctggttgatgactatgttgttgatatcccgcaagatacctggattgaacagccgtgggatatgggcgtcgtattcgtcccgccaatctccggtcgctaaggatcagcttggcgtaatcatggtcatagctgtttcctgtgtgaaattgttatccgctcacaattccacacaacatacgagccggaagcataaagtgtaaagcctggggtgcctaatgagtgagctaactcacattaattgcgttgcgctcactgcccgctttccagtcgggaaacctgtcgtgccagctgcattaatgaatcggccaacgcgcggggagaggcggtttgcgtattgggcgctcttccgcttcctcgctcactgactcgctgcgctcggtcgttcggctgcggcgagcggtatcagctcactcaaaggcggtaatacggttatccacagaatcaggggataacgcaggaaagaacatgtgagcaaaaggccagcaaaaggccaggaaccgtaaaaaggccgcgttgctggcgtttttccataggctccgcccccctgacgagcatcacaaaaatcgacgctcaagtcagaggtggcgaaacccgacaggactataaagataccaggcgtttccccctggaagctccctcgtgcgctctcctgttccgaccctgccgcttaccggatacctgtccgcctttctcccttcgggaagcgtggcgctttctcatagctcacgctgtaggtatctcagttcggtgtaggtcgttcgctccaagctgggctgtgtgcacgaaccccccgttcagcccgaccgctgcgccttatccggtaactatcgtcttgagtccaacccggtaagacacgacttatcgccactggcagcagccactggtaacaggattagcagagcgaggtatgtaggcggtgctacagagttcttgaagtggtggcctaactacggctacactagaaggacagtatttggtatctgcgctctgctgaagccagttaccttcggaaaaagagttggtagctcttgatccggcaaacaaaccaccgctggtagcggtggtttttttgtttgcaagcagcagattacgcgcagaaaaaaaggatctcaagaagatcctttgatcttttctacggggtctgacgctcagtggaacgaaaactcacgttaagggattttggtcatgagattatcaaaaaggatcttcacctagatccttttaaattaaaaatgaagttttaaatcaatctaaagtatatatgagtaaacttggtctgacagttaccaatgcttaatcagtgaggcacctatctcagcgatctgtctatttcgttcatccatagttgcctgactccccgtcgtgtagataactacgatacgggagggcttaccatctggccccagtgctgcaatgataccgcgagacccacgctcaccggctccagatttatcagcaataaaccagccagccggaagggccgagcgcagaagtggtcctgcaactttatccgcctccatccagtctattaattgttgccgggaagctagagtaagtagttcgccagttaatagtttgcgcaacgttgttgccattgctacaggcatcgtggtgtcacgctcgtcgtttggtatggcttcattcagctccggttcccaacgatcaaggcgagttacatgatcccccatgttgtgcaaaaaagcggttagctccttcggtcctccgatcgttgtcagaagtaagttggccgcagtgttatcactcatggttatggcagcactgcataattctcttactgtcatgccatccgtaagatgcttttctgtgactggtgagtactcaaccaagtcattctgagaatagtgtatgcggcgaccgagttgctcttgcccggcgtcaatacgggataataccgcgccacatagcagaactttaaaagtgctcatcattggaaaacgttcttcggggcgaaaactctcaaggatcttaccgctgttgagatccagttcgatgtaacccactcgtgcacccaactgatcttcagcatcttttactttcaccagcgtttctgggtgagcaaaaacaggaaggcaaaatgccgcaaaaaagggaataagggcgacacggaaatgttgaatactcatactcttcctttttcaatattattgaagcatttatcagggttattgtctcatgagcggatacatatttgaatgtatttagaaaaataaacaaataggggttccgcgcacatttccccgaaaagtgccacct

SEQ ID NO: 80 - DNA, 4162 bp, Artificial Sequence
  pCRII-IL24-3
agcgcccaatacgcaaaccgcctctccccgcgcgttggccgattcattaatgcagctggcacgacaggtttcccgactggaaagcgggcagtgagcgcaacgcaattaatgtgagttagctcactcattaggcaccccaggctttacactttatgcttccggctcgtatgttgtgtggaattgtgagcggataacaatttcacacaggaaacagctatgaccatgattacgccaagctatttaggtgacactatagaatactcaagctatgcatcaagcttggtaccgagctcggatccactagtaacggccgccagtgtgctggaattcgcccttgtcgaccaccatgaattttcaacagaggctgcaaagcctgtggactttagccagcagacccttctgccctcctttgctggcgacagcctctcaaatgcagatggttgtgctcccttgcctgggttttaccctgcttctctggagccaggtatcaggggcccagggccaagaattccactttgggccctgccaagtgaagggggttgttccccagaaactgtgggaagccttctgggctgtgaaagacactatgcaagctcaggataacatcacgagtgcccggctgctgcagcaggaggttctgcagaacgtctcggatgctgagagctgttaccttgtccacaccctgctggagttctacttgaaaactgttttcaaaaactaccacaatagaacagttgaagtcaggactctgaagtcattctctactctggccaacaactttgttctcatcgtgtcacaactgcaacccagtcaagaaaatgagatgttttccatcagagacagtgcacacaggcggtttctgctattccggagagcattcaaacagttggacgtagaagcagctctgaccaaagcccttggggaagtggacattcttctgacctggatgcagaaattctacaagctctgataacccgggaagggcgaattctgcagatatccatcacactggcggccgctcgagcatgcatctagagggcccaattcgccctatagtgagtcgtattacaattcactggccgtcgttttacaacgtcgtgactgggaaaaccctggcgttacccaacttaatcgccttgcagcacatccccctttcgccagctggcgtaatagcgaagaggcccgcaccgatcgcccttcccaacagttgcgcagcctatacgtacggcagtttaaggtttacacctataaaagagagagccgttatcgtctgtttgtggatgtacagagtgatattattgacacgccggggcgacggatggtgatccccctggccagtgcacgtctgctgtcagataaagtctcccgtgaactttacccggtggtgcatatcggggatgaaagctggcgcatgatgaccaccgatatggccagtgtgccggtctccgttatcggggaagaagtggctgatctcagccaccgcgaaaatgacatcaaaaacgccattaacctgatgttctggggaatataaatgtcaggcatgagattatcaaaaaggatcttcacctagatccttttcacgtagaaagccagtccgcagaaacggtgctgaccccggatgaatgtcagctactgggctatctggacaagggaaaacgcaagcgcaaagagaaagcaggtagcttgcagtgggcttacatggcgatagctagactgggcggttttatggacagcaagcgaaccggaattgccagctggggcgccctctggtaaggttgggaagccctgcaaagtaaactggatggctttctcgccgccaaggatctgatggcgcaggggatcaagctctgatcaagagacaggatgaggatcgtttcgcatgattgaacaagatggattgcacgcaggttctccggccgcttgggtggagaggctattcggctatgactgggcacaacagacaatcggctgctctgatgccgccgtgttccggctgtcagcgcaggggcgcccggttctttttgtcaagaccgacctgtccggtgccctgaatgaactgcaagacgaggcagcgcggctatcgtggctggccacgacgggcgttccttgcgcagctgtgctcgacgttgtcactgaagcgggaagggactggctgctattgggcgaagtgccggggcaggatctcctgtcatctcaccttgctcctgccgagaaagtatccatcatggctgatgcaatgcggcggctgcatacgcttgatccggctacctgcccattcgaccaccaagcgaaacatcgcatcgagcgagcacgtactcggatggaagccggtcttgtcgatcaggatgatctggacgaagagcatcaggggctcgcgccagccgaactgttcgccaggctcaaggcgagcatgcccgacggcgaggatctcgtcgtgacccatggcgatgcctgcttgccgaatatcatggtggaaaatggccgcttttctggattcatcgactgtggccggctgggtgtggcggaccgctatcaggacatagcgttggctacccgtgatattgctgaagagcttggcggcgaatgggctgaccgcttcctcgtgctttacggtatcgccgctcccgattcgcagcgcatcgccttctatcgccttcttgacgagttcttctgaattattaacgcttacaatttcctgatgcggtattttctccttacgcatctgtgcggtatttcacaccgcatacaggtggcacttttcggggaaatgtgcgcggaacccctatttgtttatttttctaaatacattcaaatatgtatccgctcatgagacaataaccctgataaatgcttcaataatagcacgtgaggagggccaccatggccaagttgaccagtgccgttccggtgctcaccgcgcgcgacgtcgccggagcggtcgagttctggaccgaccggctcgggttctcccgggacttcgtggaggacgacttcgccggtgtggtccgggacgacgtgaccctgttcatcagcgcggtccaggaccaggtggtgccggacaacaccctggcctgggtgtgggtgcgcggcctggacgagctgtacgccgagtggtcggaggtcgtgtccacgaacttccgggacgcctccgggccggccatgaccgagatcggcgagcagccgtgggggcgggagttcgccctgcgcgacccggccggcaactgcgtgcacttcgtggccgaggagcaggactgacacgtgctaaaacttcatttttaatttaaaaggatctaggtgaagatcctttttgataatctcatgaccaaaatcccttaacgtgagttttcgttccactgagcgtcagaccccgtagaaaagatcaaaggatcttcttgagatcctttttttctgcgcgtaatctgctgcttgcaaacaaaaaaaccaccgctaccagcggtggtttgtttgccggatcaagagctaccaactctttttccgaaggtaactggcttcagcagagcgcagataccaaatactgtccttctagtgtagccgtagttaggccaccacttcaagaactctgtagcaccgcctacatacctcgctctgctaatcctgttaccagtggctgctgccagtggcgataagtcgtgtcttaccgggttggactcaagacgatagttaccggataaggcgcagcggtcgggctgaacggggggttcgtgcacacagcccagcttggagcgaacgacctacaccgaactgagatacctacagcgtgagctatgagaaagcgccacgcttcccgaagggagaaaggcggacaggtatccggtaagcggcagggtcggaacaggagagcgcacgagggagcttccagggggaaacgcctggtatctttatagtcctgtcgggtttcgccacctctgacttgagcgtcgatttttgtgatgctcgtcaggggggcggagcctatggaaaaacgccagcaacgcggcctttttacggttcctgggcttttgctggccttttgctcacatgttctttcctgcgttatcccctgattctgtggataaccgtattaccgcctttgagtgagctgataccgctcgccgcagccgaacgaccgagcgcagcgagtcagtgagcgaggaagcggaag

SEQ ID NO: 81 - DNA, 4676 bp, Artificial Sequence
  pCR-SE-IL24-2
agcgcccaatacgcaaaccgcctctccccgcgcgttggccgattcattaatgcagctggcacgacaggtttcccgactggaaagcgggcagtgagcgcaacgcaattaatgtgagttagctcactcattaggcaccccaggctttacactttatgcttccggctcgtatgttgtgtggaattgtgagcggataacaatttcacacaggaaacagctatgaccatgattacgccaagcttggtaccgagctctccagacattgttgaattagatcgataaaaattaattaattacccgggttatcagagcttgtagaatttctgcatccaggtcagaagaatgtccacttccccaagggctttggtcagagctgcttctacgtccaactgtttgaatgctctccggaatagcagaaaccgcctgtgtgcactgtctctgatggaaaacatctcattttcttgactgggttgcagttgtgacacgatgagaacaaagttgttggccagagtagagaatgacttcagagtcctgacttcaactgttctattgtggtagtttttgaaaacagttttcaagtagaactccagcagggtgtggacaaggtaacagctctcagcatccgagacgttctgcagaacctcctgctgcagcagccgggcactcgtgatgttatcctgagcttgcatagtgtctttcacagcccagaaggcttcccacagtttctggggaacaacccccttcacttggcagggcccaaagtggaattcttggccctgggcccctgatacctggctccagagaagcagggtaaaacccaggcaagggagcacaaccatctgcatttgagaggctgtcgccagcaaaggagggcagaagggtctgctggctaaagtccacaggctttgcagcctctgttgaaaattcatggtggtcgacttcgagcaaaaaaagacgctagtttttcaatttttgagctcggatccttctgtgagcgtatggcagatggtgccaccgtagtgtactagtaacggccgccagtgtgctggaattctgcagatatccatcacactggcggccgctcgagcatgcatctagagggcccaattcgccctatagtgagtcgtattacaattcactggccgtcgttttacaacgtcgtgactgggaaaaccctggcgttacccaacttaatcgccttgcagcacatccccctttcgccagctggcgtaatagcgaagaggcccgcaccgatcgcccttcccaacagttgcgcagcctgaatggcgaatggacgcgccctgtagcggcgcattaagcgcggcgggtgtggtggttacgcgcagcgtgaccgctacacttgccagcgccctagcgcccgctcctttcgctttcttcccttcctttctcgccacgttcgccggctttccccgtcaagctctaaatcgggggctccctttagggttccgatttagtgctttacggcacctcgaccccaaaaaacttgattagggtgatggttcacgtagtgggccatcgccctgatagacggtttttcgccctttgacgttggagtccacgttctttaatagtggactcttgttccaaactggaacaacactcaaccctatctcggtctattcttttgatttataagggattttgccgatttcggcctattggttaaaaaatgagctgatttaacaaaaatttaacgcgaattttaacaaaattcagggcgcaagggctgctaaaggaagcggaacacgtagaaagccagtccgcagaaacggtgctgaccccggatgaatgtcagctactgggctatctggacaagggaaaacgcaagcgcaaagagaaagcaggtagcttgcagtgggcttacatggcgatagctagactgggcggttttatggacagcaagcgaaccggaattgccagctggggcgccctctggtaaggttgggaagccctgcaaagtaaactggatggctttcttgccgccaaggatctgatggcgcaggggatcaagatctgatcaagagacaggatgaggatcgtttcgcatgattgaacaagatggattgcacgcaggttctccggccgcttgggtggagaggctattcggctatgactgggcacaacagacaatcggctgctctgatgccgccgtgttccggctgtcagcgcaggggcgcccggttctttttgtcaagaccgacctgtccggtgccctgaatgaactgcaggacgaggcagcgcggctatcgtggctggccacgacgggcgttccttgcgcagctgtgctcgacgttgtcactgaagcgggaagggactggctgctattgggcgaagtgccggggcaggatctcctgtcatcccaccttgctcctgccgagaaagtatccatcatggctgatgcaatgcggcggctgcatacgcttgatccggctacctgcccattcgaccaccaagcgaaacatcgcatcgagcgagcacgtactcggatggaagccggtcttgtcgatcaggatgatctggacgaagagcatcaggggctcgcgccagccgaactgttcgccaggctcaaggcgcgcatgcccgacggcgaggatctcgtcgtgacccatggcgatgcctgcttgccgaatatcatggtggaaaatggccgcttttctggattcatcgactgtggccggctgggtgtggcggaccgctatcaggacatagcgttggctacccgtgatattgctgaagagcttggcggcgaatgggctgaccgcttcctcgtgctttacggtatcgccgctcccgattcgcagcgcatcgccttctatcgccttcttgacgagttcttctgaattgaaaaaggaagagtatgagtattcaacatttccgtgtcgcccttattcccttttttgcggcattttgccttcctgtttttgctcacccagaaacgctggtgaaagtaaaagatgctgaagatcagttgggtgcacgagtgggttacatcgaactggatctcaacagcggtaagatccttgagagttttcgccccgaagaacgttttccaatgatgagcacttttaaagttctgctatgtggcgcggtattatcccgtattgacgccgggcaagagcaactcggtcgccgcatacactattctcagaatgacttggttgagtactcaccagtcacagaaaagcatcttacggatggcatgacagtaagagaattatgcagtgctgccataaccatgagtgataacactgcggccaacttacttctgacaacgatcggaggaccgaaggagctaaccgcttttttgcacaacatgggggatcatgtaactcgccttgatcgttgggaaccggagctgaatgaagccataccaaacgacgagcgtgacaccacgatgcctgtagcaatggcaacaacgttgcgcaaactattaactggcgaactacttactctagcttcccggcaacaattaatagactggatggaggcggataaagttgcaggaccacttctgcgctcggcccttccggctggctggtttattgctgataaatctggagccggtgagcgtgggtctcgcggtatcattgcagcactggggccagatggtaagccctcccgtatcgtagttatctacacgacggggagtcaggcaactatggatgaacgaaatagacagatcgctgagataggtgcctcactgattaagcattggtaactgtcagaccaagtttactcatatatactttagattgatttaaaacttcatttttaatttaaaaggatctaggtgaagatcctttttgataatctcatgaccaaaatcccttaacgtgagttttcgttccactgagcgtcagaccccgtagaaaagatcaaaggatcttcttgagatcctttttttctgcgcgtaatctgctgcttgcaaacaaaaaaaccaccgctaccagcggtggtttgtttgccggatcaagagctaccaactctttttccgaaggtaactggcttcagcagagcgcagataccaaatactgttcttctagtgtagccgtagttaggccaccacttcaagaactctgtagcaccgcctacatacctcgctctgctaatcctgttaccagtggctgctgccagtggcgataagtcgtgtcttaccgggttggactcaagacgatagttaccggataaggcgcagcggtcgggctgaacggggggttcgtgcacacagcccagcttggagcgaacgacctacaccgaactgagatacctacagcgtgagctatgagaaagcgccacgcttcccgaagggagaaaggcggacaggtatccggtaagcggcagggtcggaacaggagagcgcacgagggagcttccagggggaaacgcctggtatctttatagtcctgtcgggtttcgccacctctgacttgagcgtcgatttttgtgatgctcgtcaggggggcggagcctatggaaaaacgccagcaacgcggcctttttacggttcctggccttttgctggccttttgctcacatgttctttcctgcgttatcccctgattctgtggataaccgtattaccgcctttgagtgagctgataccgctcgccgcagccgaacgaccgagcgcagcgagtcagtgagcgaggaagcggaag

SEQ ID NO: 82 - DNA, 4674 bp, Artificial Sequence
  pCR-SL-IL24-2
agcgcccaatacgcaaaccgcctctccccgcgcgttggccgattcattaatgcagctggcacgacaggtttcccgactggaaagcgggcagtgagcgcaacgcaattaatgtgagttagctcactcattaggcaccccaggctttacactttatgcttccggctcgtatgttgtgtggaattgtgagcggataacaatttcacacaggaaacagctatgaccatgattacgccaagcttggtaccgagctctccagacattgttgaattagatcgataaaaattaattaattacccgggttatcagagcttgtagaatttctgcatccaggtcagaagaatgtccacttccccaagggctttggtcagagctgcttctacgtccaactgtttgaatgctctccggaatagcagaaaccgcctgtgtgcactgtctctgatggaaaacatctcattttcttgactgggttgcagttgtgacacgatgagaacaaagttgttggccagagtagagaatgacttcagagtcctgacttcaactgttctattgtggtagtttttgaaaacagttttcaagtagaactccagcagggtgtggacaaggtaacagctctcagcatccgagacgttctgcagaacctcctgctgcagcagccgggcactcgtgatgttatcctgagcttgcatagtgtctttcacagcccagaaggcttcccacagtttctggggaacaacccccttcacttggcagggcccaaagtggaattcttggccctgggcccctgatacctggctccagagaagcagggtaaaacccaggcaagggagcacaaccatctgcatttgagaggctgtcgccagcaaaggagggcagaagggtctgctggctaaagtccacaggctttgcagcctctgttgaaaattcatggtggtcgacttatttatatgccaaaaaaaaaaaaaaaaaaaagagctcggatccttctgtgagcgtatggcagatggtgccaccgtagtgtactagtaacggccgccagtgtgctggaattctgcagatatccatcacactggcggccgctcgagcatgcatctagagggcccaattcgccctatagtgagtcgtattacaattcactggccgtcgttttacaacgtcgtgactgggaaaaccctggcgttacccaacttaatcgccttgcagcacatccccctttcgccagctggcgtaatagcgaagaggcccgcaccgatcgcccttcccaacagttgcgcagcctgaatggcgaatggacgcgccctgtagcggcgcattaagcgcggcgggtgtggtggttacgcgcagcgtgaccgctacacttgccagcgccctagcgcccgctcctttcgctttcttcccttcctttctcgccacgttcgccggctttccccgtcaagctctaaatcgggggctccctttagggttccgatttagtgctttacggcacctcgaccccaaaaaacttgattagggtgatggttcacgtagtgggccatcgccctgatagacggtttttcgccctttgacgttggagtccacgttctttaatagtggactcttgttccaaactggaacaacactcaaccctatctcggtctattcttttgatttataagggattttgccgatttcggcctattggttaaaaaatgagctgatttaacaaaaatttaacgcgaattttaacaaaattcagggcgcaagggctgctaaaggaagcggaacacgtagaaagccagtccgcagaaacggtgctgaccccggatgaatgtcagctactgggctatctggacaagggaaaacgcaagcgcaaagagaaagcaggtagcttgcagtgggcttacatggcgatagctagactgggcggttttatggacagcaagcgaaccggaattgccagctggggcgccctctggtaaggttgggaagccctgcaaagtaaactggatggctttcttgccgccaaggatctgatggcgcaggggatcaagatctgatcaagagacaggatgaggatcgtttcgcatgattgaacaagatggattgcacgcaggttctccggccgcttgggtggagaggctattcggctatgactgggcacaacagacaatcggctgctctgatgccgccgtgttccggctgtcagcgcaggggcgcccggttctttttgtcaagaccgacctgtccggtgccctgaatgaactgcaggacgaggcagcgcggctatcgtggctggccacgacgggcgttccttgcgcagctgtgctcgacgttgtcactgaagcgggaagggactggctgctattgggcgaagtgccggggcaggatctcctgtcatcccaccttgctcctgccgagaaagtatccatcatggctgatgcaatgcggcggctgcatacgcttgatccggctacctgcccattcgaccaccaagcgaaacatcgcatcgagcgagcacgtactcggatggaagccggtcttgtcgatcaggatgatctggacgaagagcatcaggggctcgcgccagccgaactgttcgccaggctcaaggcgcgcatgcccgacggcgaggatctcgtcgtgacccatggcgatgcctgcttgccgaatatcatggtggaaaatggccgcttttctggattcatcgactgtggccggctgggtgtggcggaccgctatcaggacatagcgttggctacccgtgatattgctgaagagcttggcggcgaatgggctgaccgcttcctcgtgctttacggtatcgccgctcccgattcgcagcgcatcgccttctatcgccttcttgacgagttcttctgaattgaaaaaggaagagtatgagtattcaacatttccgtgtcgcccttattcccttttttgcggcattttgccttcctgtttttgctcacccagaaacgctggtgaaagtaaaagatgctgaagatcagttgggtgcacgagtgggttacatcgaactggatctcaacagcggtaagatccttgagagttttcgccccgaagaacgttttccaatgatgagcacttttaaagttctgctatgtggcgcggtattatcccgtattgacgccgggcaagagcaactcggtcgccgcatacactattctcagaatgacttggttgagtactcaccagtcacagaaaagcatcttacggatggcatgacagtaagagaattatgcagtgctgccataaccatgagtgataacactgcggccaacttacttctgacaacgatcggaggaccgaaggagctaaccgcttttttgcacaacatgggggatcatgtaactcgccttgatcgttgggaaccggagctgaatgaagccataccaaacgacgagcgtgacaccacgatgcctgtagcaatggcaacaacgttgcgcaaactattaactggcgaactacttactctagcttcccggcaacaattaatagactggatggaggcggataaagttgcaggaccacttctgcgctcggcccttccggctggctggtttattgctgataaatctggagccggtgagcgtgggtctcgcggtatcattgcagcactggggccagatggtaagccctcccgtatcgtagttatctacacgacggggagtcaggcaactatggatgaacgaaatagacagatcgctgagataggtgcctcactgattaagcattggtaactgtcagaccaagtttactcatatatactttagattgatttaaaacttcatttttaatttaaaaggatctaggtgaagatcctttttgataatctcatgaccaaaatcccttaacgtgagttttcgttccactgagcgtcagaccccgtagaaaagatcaaaggatcttcttgagatcctttttttctgcgcgtaatctgctgcttgcaaacaaaaaaaccaccgctaccagcggtggtttgtttgccggatcaagagctaccaactctttttccgaaggtaactggcttcagcagagcgcagataccaaatactgttcttctagtgtagccgtagttaggccaccacttcaagaactctgtagcaccgcctacatacctcgctctgctaatcctgttaccagtggctgctgccagtggcgataagtcgtgtcttaccgggttggactcaagacgatagttaccggataaggcgcagcggtcgggctgaacggggggttcgtgcacacagcccagcttggagcgaacgacctacaccgaactgagatacctacagcgtgagctatgagaaagcgccacgcttcccgaagggagaaaggcggacaggtatccggtaagcggcagggtcggaacaggagagcgcacgagggagcttccagggggaaacgcctggtatctttatagtcctgtcgggtttcgccacctctgacttgagcgtcgatttttgtgatgctcgtcaggggggcggagcctatggaaaaacgccagcaacgcggcctttttacggttcctggccttttgctggccttttgctcacatgttctttcctgcgttatcccctgattctgtggataaccgtattaccgcctttgagtgagctgataccgctcgccgcagccgaacgaccgagcgcagcgagtcagtgagcgaggaagcggaag

SEQ ID NO: 83 - DNA, 4710 bp, Artificial Sequence
  pCR-SEL-IL24-2
agcgcccaatacgcaaaccgcctctccccgcgcgttggccgattcattaatgcagctggcacgacaggtttcccgactggaaagcgggcagtgagcgcaacgcaattaatgtgagttagctcactcattaggcaccccaggctttacactttatgcttccggctcgtatgttgtgtggaattgtgagcggataacaatttcacacaggaaacagctatgaccatgattacgccaagcttggtaccgagctctccagacattgttgaattagatcgataaaaattaattaattacccgggttatcagagcttgtagaatttctgcatccaggtcagaagaatgtccacttccccaagggctttggtcagagctgcttctacgtccaactgtttgaatgctctccggaatagcagaaaccgcctgtgtgcactgtctctgatggaaaacatctcattttcttgactgggttgcagttgtgacacgatgagaacaaagttgttggccagagtagagaatgacttcagagtcctgacttcaactgttctattgtggtagtttttgaaaacagttttcaagtagaactccagcagggtgtggacaaggtaacagctctcagcatccgagacgttctgcagaacctcctgctgcagcagccgggcactcgtgatgttatcctgagcttgcatagtgtctttcacagcccagaaggcttcccacagtttctggggaacaacccccttcacttggcagggcccaaagtggaattcttggccctgggcccctgatacctggctccagagaagcagggtaaaacccaggcaagggagcacaaccatctgcatttgagaggctgtcgccagcaaaggagggcagaagggtctgctggctaaagtccacaggctttgcagcctctgttgaaaattcatggtggtcgacttcgagcttatttatattccaaaaaaaaaaaataaaatttcaatttttaagctttcactaattccaaaccgagctcggatccttctgtgagcgtatggcagatggtgccaccgtagtgtactagtaacggccgccagtgtgctgaattctgcagatatccatcacactggcggccgctcgagcatgcatctagagggcccaattcgccctatagtgagtcgtattacaattcactggccgtcgttttacaacgtcgtgactgggaaaaccctggcgttacccaacttaatcgccttgcagcacatccccctttcgccagctggcgtaatagcgaagaggcccgcaccgatcgcccttcccaacagttgcgcagcctgaatggcgaatggacgcgccctgtagcggcgcattaagcgcggcgggtgtggtggttacgcgcagcgtgaccgctacacttgccagcgccctagcgcccgctcctttcgctttcttcccttcctttctcgccacgttcgccggctttccccgtcaagctctaaatcgggggctccctttagggttccgatttagtgctttacggcacctcgaccccaaaaaacttgattagggtgatggttcacgtagtgggccatcgccctgatagacggtttttcgccctttgacgttggagtccacgttctttaatagtggactcttgttccaaactggaacaacactcaaccctatctcggtctattcttttgatttataagggattttgccgatttcggcctattggttaaaaaatgagctgatttaacaaaaatttaacgcgaattttaacaaaattcagggcgcaagggctgctaaaggaagcggaacacgtagaaagccagtccgcagaaacggtgctgaccccggatgaatgtcagctactgggctatctggacaagggaaaacgcaagcgcaaagagaaagcaggtagcttgcagtgggcttacatggcgatagctagactgggcggttttatggacagcaagcgaaccggaattgccagctggggcgccctctggtaaggttgggaagccctgcaaagtaaactggatggctttcttgccgccaaggatctgatggcgcaggggatcaagatctgatcaagagacaggatgaggatcgtttcgcatgattgaacaagatggattgcacgcaggttctccggccgcttgggtggagaggctattcggctatgactgggcacaacagacaatcggctgctctgatgccgccgtgttccggctgtcagcgcaggggcgcccggttctttttgtcaagaccgacctgtccggtgccctgaatgaactgcaggacgaggcagcgcggctatcgtggctggccacgacgggcgttccttgcgcagctgtgctcgacgttgtcactgaagcgggaagggactggctgctattgggcgaagtgccggggcaggatctcctgtcatcccaccttgctcctgccgagaaagtatccatcatggctgatgcaatgcggcggctgcatacgcttgatccggctacctgcccattcgaccaccaagcgaaacatcgcatcgagcgagcacgtactcggatggaagccggtcttgtcgatcaggatgatctggacgaagagcatcaggggctcgcgccagccgaactgttcgccaggctcaaggcgcgcatgcccgacggcgaggatctcgtcgtgacccatggcgatgcctgcttgccgaatatcatggtggaaaatggccgcttttctggattcatcgactgtggccggctgggtgtggcggaccgctatcaggacatagcgttggctacccgtgatattgctgaagagcttggcggcgaatgggctgaccgcttcctcgtgctttacggtatcgccgctcccgattcgcagcgcatcgccttctatcgccttcttgacgagttcttctgaattgaaaaaggaagagtatgagtattcaacatttccgtgtcgcccttattcccttttttgcggcattttgccttcctgtttttgctcacccagaaacgctggtgaaagtaaaagatgctgaagatcagttgggtgcacgagtgggttacatcgaactggatctcaacagcggtaagatccttgagagttttcgccccgaagaacgttttccaatgatgagcacttttaaagttctgctatgtggcgcggtattatcccgtattgacgccgggcaagagcaactcggtcgccgcatacactattctcagaatgacttggttgagtactcaccagtcacagaaaagcatcttacggatggcatgacagtaagagaattatgcagtgctgccataaccatgagtgataacactgcggccaacttacttctgacaacgatcggaggaccgaaggagctaaccgcttttttgcacaacatgggggatcatgtaactcgccttgatcgttgggaaccggagctgaatgaagccataccaaacgacgagcgtgacaccacgatgcctgtagcaatggcaacaacgttgcgcaaactattaactggcgaactacttactctagcttcccggcaacaattaatagactggatggaggcggataaagttgcaggaccacttctgcgctcggcccttccggctggctggtttattgctgataaatctggagccggtgagcgtgggtctcgcggtatcattgcagcactggggccagatggtaagccctcccgtatcgtagttatctacacgacggggagtcaggcaactatggatgaacgaaatagacagatcgctgagataggtgcctcactgattaagcattggtaactgtcagaccaagtttactcatatatactttagattgatttaaaacttcatttttaatttaaaaggatctaggtgaagatcctttttgataatctcatgaccaaaatcccttaacgtgagttttcgttccactgagcgtcagaccccgtagaaaagatcaaaggatcttcttgagatcctttttttctgcgcgtaatctgctgcttgcaaacaaaaaaaccaccgctaccagcggtggtttgtttgccggatcaagagctaccaactctttttccgaaggtaactggcttcagcagagcgcagataccaaatactgttcttctagtgtagccgtagttaggccaccacttcaagaactctgtagcaccgcctacatacctcgctctgctaatcctgttaccagtggctgctgccagtggcgataagtcgtgtcttaccgggttggactcaagacgatagttaccggataaggcgcagcggtcgggctgaacggggggttcgtgcacacagcccagcttggagcgaacgacctacaccgaactgagatacctacagcgtgagctatgagaaagcgccacgcttcccgaagggagaaaggcggacaggtatccggtaagcggcagggtcggaacaggagagcgcacgagggagcttccagggggaaacgcctggtatctttatagtcctgtcgggtttcgccacctctgacttgagcgtcgatttttgtgatgctcgtcaggggggcggagcctatggaaaaacgccagcaacgcggcctttttacggttcctggccttttgctggccttttgctcacatgttctttcctgcgttatcccctgattctgtggataaccgtattaccgcctttgagtgagctgataccgctcgccgcagccgaacgaccgagcgcagcgagtcagtgagcgaggaagcggaag

SEQ ID NO: 84 - DNA, 4793 bp, Artificial Sequence
  FSE-IL24-1
gacgtctaagaaaccattattatcatgacattaacctataaaaataggcgtatcacgaggccctttcgtctcgcgcgtttcggtgatgacggtgaaaacctctgacacatgcagctcccggagacggtcacagcttgtctgtaagcggatgccgggagcagacaagcccgtcagggcgcgtcagcgggtgttggcgggtgtcggggctggcttaactatgcggcatcagagcagattgtactgagagtgcaccatatgtagaagaattgataaatatgaaaccttttaagaatatgaataaaataacaattaatcaaaaggataattgtatattagcaaatcgatgctttgttaaaatagatactcctagatacataccatcgacatccattagcagttctaatatcatcagaatacggaatcatgattttacattatctgaattattgtattcaccgtttcattttcaacagcctcagtttcaatatctccttcctgggtttgtattaacgtgtattgataaagtttcgaaacagcaaaaagaatgtaaatattgtatctctaatcgtggagatgatgatagtttaagcattaatctatttattccgactattaacaagtctatatatattattatcggtttacggatgaaaaatttttggaagcctaaattcgaaatagaataatgtttttatattatacatgtgctaaaagaatgatcgatacagtttaagtgaaagctagagaggggtttttaaatggtcatcggtttagtcatattcgtgtctgtaagcttggtaccgagctctccagacattgttgaattagatcgataaaaattaattaattacccgggttatcagagcttgtagaatttctgcatccaggtcagaagaatgtccacttccccaagggctttggtcagagctgcttctacgtccaactgtttgaatgctctccggaatagcagaaaccgcctgtgtgcactgtctctgatggaaaacatctcattttcttgactgggttgcagttgtgacacgatgagaacaaagttgttggccagagtagagaatgacttcagagtcctgacttcaactgttctattgtggtagtttttgaaaacagttttcaagtagaactccagcagggtgtggacaaggtaacagctctcagcatccgagacgttctgcagaacctcctgctgcagcagccgggcactcgtgatgttatcctgagcttgcatagtgtctttcacagcccagaaggcttcccacagtttctggggaacaacccccttcacttggcagggcccaaagtggaattcttggccctgggcccctgatacctggctccagagaagcagggtaaaacccaggcaagggagcacaaccatctgcatttgagaggctgtcgccagcaaaggagggcagaagggtctgctggctaaagtccacaggctttgcagcctctgttgaaaattcatggtggtcgacttcgagcaaaaaaagacgctagtttttcaatttttgagctcggatcctgcggccgccatcgtcggtgtgttgtctaacgtattggacatgtttatgtacgtagaagaaaataatgaagaggatgctagaatcaaggaggagcaagaactactgttgctatattaatacataattgaaaatctaccaacttaaatacaccgcctataaatttacaatgaaacacagattgtattctgaaggattgagtattagtaatgatttaaactcgataatcggtcaacaatctacaatggatacggatatagaaatagacgaagatgacatcatggaacttcttaatatattgactgagttaggttgtgatgtcgactttgatgaaaattttagcgatatagccgatgatattctagaatcgttgatagaacaggatgtataagtttttatgttaactaaatgtggccatttgcatcggtacctgcgggagcaaaatgtaggctggtagaaacactaccagaaaatatggattttagatccgatcatttaacaacatttgaatgttttaacgaaattatcactctagctaagaaatatatatacatagcatctttttgttgtaatcctctgaattctagaaaagtagaaaatatattctaatttattgcacgggatgagcgaaaaatacatcgtcacctgggacatgttgcagatccatgcacgtaaactcgcaagccgactgatgccttctgaacaatggaaaggcattattgccgtaagccgtggcggtctggtaccgggtgcgttactggcgcgtgaactgggtattcgtcatgtcgataccgtttgtatttccagctacgatcacgacaaccagcgcgagcttaaagtgctgaaacgcgcagaaggcgatggcgaaggcttcatcgttattgatgacctggtggataccggtggtactgcggttgcgattcgtgaaatgtatccaaaagcgcactttgtcaccatcttcgcaaaaccggctggtcgtccgctggttgatgactatgttgttgatatcccgcaagatacctggattgaacagccgtgggatatgggcgtcgtattcgtcccgccaatctccggtcgctaaggatcagcttggcgtaatcatggtcatagctgtttcctgtgtgaaattgttatccgctcacaattccacacaacatacgagccggaagcataaagtgtaaagcctggggtgcctaatgagtgagctaactcacattaattgcgttgcgctcactgcccgctttccagtcgggaaacctgtcgtgccagctgcattaatgaatcggccaacgcgcggggagaggcggtttgcgtattgggcgctcttccgcttcctcgctcactgactcgctgcgctcggtcgttcggctgcggcgagcggtatcagctcactcaaaggcggtaatacggttatccacagaatcaggggataacgcaggaaagaacatgtgagcaaaaggccagcaaaaggccaggaaccgtaaaaaggccgcgttgctggcgtttttccataggctccgcccccctgacgagcatcacaaaaatcgacgctcaagtcagaggtggcgaaacccgacaggactataaagataccaggcgtttccccctggaagctccctcgtgcgctctcctgttccgaccctgccgcttaccggatacctgtccgcctttctcccttcgggaagcgtggcgctttctcatagctcacgctgtaggtatctcagttcggtgtaggtcgttcgctccaagctgggctgtgtgcacgaaccccccgttcagcccgaccgctgcgccttatccggtaactatcgtcttgagtccaacccggtaagacacgacttatcgccactggcagcagccactggtaacaggattagcagagcgaggtatgtaggcggtgctacagagttcttgaagtggtggcctaactacggctacactagaaggacagtatttggtatctgcgctctgctgaagccagttaccttcggaaaaagagttggtagctcttgatccggcaaacaaaccaccgctggtagcggtggtttttttgtttgcaagcagcagattacgcgcagaaaaaaaggatctcaagaagatcctttgatcttttctacggggtctgacgctcagtggaacgaaaactcacgttaagggattttggtcatgagattatcaaaaaggatcttcacctagatccttttaaattaaaaatgaagttttaaatcaatctaaagtatatatgagtaaacttggtctgacagttaccaatgcttaatcagtgaggcacctatctcagcgatctgtctatttcgttcatccatagttgcctgactccccgtcgtgtagataactacgatacgggagggcttaccatctggccccagtgctgcaatgataccgcgagacccacgctcaccggctccagatttatcagcaataaaccagccagccggaagggccgagcgcagaagtggtcctgcaactttatccgcctccatccagtctattaattgttgccgggaagctagagtaagtagttcgccagttaatagtttgcgcaacgttgttgccattgctacaggcatcgtggtgtcacgctcgtcgtttggtatggcttcattcagctccggttcccaacgatcaaggcgagttacatgatcccccatgttgtgcaaaaaagcggttagctccttcggtcctccgatcgttgtcagaagtaagttggccgcagtgttatcactcatggttatggcagcactgcataattctcttactgtcatgccatccgtaagatgcttttctgtgactggtgagtactcaaccaagtcattctgagaatagtgtatgcggcgaccgagttgctcttgcccggcgtcaatacgggataataccgcgccacatagcagaactttaaaagtgctcatcattggaaaacgttcttcggggcgaaaactctcaaggatcttaccgctgttgagatccagttcgatgtaacccactcgtgcacccaactgatcttcagcatcttttactttcaccagcgtttctgggtgagcaaaaacaggaaggcaaaatgccgcaaaaaagggaataagggcgacacggaaatgttgaatactcatactcttcctttttcaatattattgaagcatttatcagggttattgtctcatgagcggatacatatttgaatgtatttagaaaaataaacaaataggggttccgcgcacatttccccgaaaagtgccacct

SEQ ID NO: 85 - DNA, 4791 bp, Artificial Sequence
  FSL-IL24-1
gacgtctaagaaaccattattatcatgacattaacctataaaaataggcgtatcacgaggccctttcgtctcgcgcgtttcggtgatgacggtgaaaacctctgacacatgcagctcccggagacggtcacagcttgtctgtaagcggatgccgggagcagacaagcccgtcagggcgcgtcagcgggtgttggcgggtgtcggggctggcttaactatgcggcatcagagcagattgtactgagagtgcaccatatgtagaagaattgataaatatgaaaccttttaagaatatgaataaaataacaattaatcaaaaggataattgtatattagcaaatcgatgctttgttaaaatagatactcctagatacataccatcgacatccattagcagttctaatatcatcagaatacggaatcatgattttacattatctgaattattgtattcaccgtttcattttcaacagcctcagtttcaatatctccttcctgggtttgtattaacgtgtattgataaagtttcgaaacagcaaaaagaatgtaaatattgtatctctaatcgtggagatgatgatagtttaagcattaatctatttattccgactattaacaagtctatatatattattatcggtttacggatgaaaaatttttggaagcctaaattcgaaatagaataatgtttttatattatacatgtgctaaaagaatgatcgatacagtttaagtgaaagctagagaggggtttttaaatggtcatcggtttagtcatattcgtgtctgtaagcttggtaccgagctctccagacattgttgaattagatcgataaaaattaattaattacccgggttatcagagcttgtagaatttctgcatccaggtcagaagaatgtccacttccccaagggctttggtcagagctgcttctacgtccaactgtttgaatgctctccggaatagcagaaaccgcctgtgtgcactgtctctgatggaaaacatctcattttcttgactgggttgcagttgtgacacgatgagaacaaagttgttggccagagtagagaatgacttcagagtcctgacttcaactgttctattgtggtagtttttgaaaacagttttcaagtagaactccagcagggtgtggacaaggtaacagctctcagcatccgagacgttctgcagaacctcctgctgcagcagccgggcactcgtgatgttatcctgagcttgcatagtgtctttcacagcccagaaggcttcccacagtttctggggaacaacccccttcacttggcagggcccaaagtggaattcttggccctgggcccctgatacctggctccagagaagcagggtaaaacccaggcaagggagcacaaccatctgcatttgagaggctgtcgccagcaaaggagggcagaagggtctgctggctaaagtccacaggctttgcagcctctgttgaaaattcatggtggtcgacttatttatatgccaaaaaaaaaaaaaaaaaaaagagctcggatcctgcggccgccatcgtcggtgtgttgtctaacgtattggacatgtttatgtacgtagaagaaaataatgaagaggatgctagaatcaaggaggagcaagaactactgttgctatattaatacataattgaaaatctaccaacttaaatacaccgcctataaatttacaatgaaacacagattgtattctgaaggattgagtattagtaatgatttaaactcgataatcggtcaacaatctacaatggatacggatatagaaatagacgaagatgacatcatggaacttcttaatatattgactgagttaggttgtgatgtcgactttgatgaaaattttagcgatatagccgatgatattctagaatcgttgatagaacaggatgtataagtttttatgttaactaaatgtggccatttgcatcggtacctgcgggagcaaaatgtaggctggtagaaacactaccagaaaatatggattttagatccgatcatttaacaacatttgaatgttttaacgaaattatcactctagctaagaaatatatatacatagcatctttttgttgtaatcctctgaattctagaaaagtagaaaatatattctaatttattgcacgggatgagcgaaaaatacatcgtcacctgggacatgttgcagatccatgcacgtaaactcgcaagccgactgatgccttctgaacaatggaaaggcattattgccgtaagccgtggcggtctggtaccgggtgcgttactggcgcgtgaactgggtattcgtcatgtcgataccgtttgtatttccagctacgatcacgacaaccagcgcgagcttaaagtgctgaaacgcgcagaaggcgatggcgaaggcttcatcgttattgatgacctggtggataccggtggtactgcggttgcgattcgtgaaatgtatccaaaagcgcactttgtcaccatcttcgcaaaaccggctggtcgtccgctggttgatgactatgttgttgatatcccgcaagatacctggattgaacagccgtgggatatgggcgtcgtattcgtcccgccaatctccggtcgctaaggatcagcttggcgtaatcatggtcatagctgtttcctgtgtgaaattgttatccgctcacaattccacacaacatacgagccggaagcataaagtgtaaagcctggggtgcctaatgagtgagctaactcacattaattgcgttgcgctcactgcccgctttccagtcgggaaacctgtcgtgccagctgcattaatgaatcggccaacgcgcggggagaggcggtttgcgtattgggcgctcttccgcttcctcgctcactgactcgctgcgctcggtcgttcggctgcggcgagcggtatcagctcactcaaaggcggtaatacggttatccacagaatcaggggataacgcaggaaagaacatgtgagcaaaaggccagcaaaaggccaggaaccgtaaaaaggccgcgttgctggcgtttttccataggctccgcccccctgacgagcatcacaaaaatcgacgctcaagtcagaggtggcgaaacccgacaggactataaagataccaggcgtttccccctggaagctccctcgtgcgctctcctgttccgaccctgccgcttaccggatacctgtccgcctttctcccttcgggaagcgtggcgctttctcatagctcacgctgtaggtatctcagttcggtgtaggtcgttcgctccaagctgggctgtgtgcacgaaccccccgttcagcccgaccgctgcgccttatccggtaactatcgtcttgagtccaacccggtaagacacgacttatcgccactggcagcagccactggtaacaggattagcagagcgaggtatgtaggcggtgctacagagttcttgaagtggtggcctaactacggctacactagaaggacagtatttggtatctgcgctctgctgaagccagttaccttcggaaaaagagttggtagctcttgatccggcaaacaaaccaccgctggtagcggtggtttttttgtttgcaagcagcagattacgcgcagaaaaaaaggatctcaagaagatcctttgatcttttctacggggtctgacgctcagtggaacgaaaactcacgttaagggattttggtcatgagattatcaaaaaggatcttcacctagatccttttaaattaaaaatgaagttttaaatcaatctaaagtatatatgagtaaacttggtctgacagttaccaatgcttaatcagtgaggcacctatctcagcgatctgtctatttcgttcatccatagttgcctgactccccgtcgtgtagataactacgatacgggagggcttaccatctggccccagtgctgcaatgataccgcgagacccacgctcaccggctccagatttatcagcaataaaccagccagccggaagggccgagcgcagaagtggtcctgcaactttatccgcctccatccagtctattaattgttgccgggaagctagagtaagtagttcgccagttaatagtttgcgcaacgttgttgccattgctacaggcatcgtggtgtcacgctcgtcgtttggtatggcttcattcagctccggttcccaacgatcaaggcgagttacatgatcccccatgttgtgcaaaaaagcggttagctccttcggtcctccgatcgttgtcagaagtaagttggccgcagtgttatcactcatggttatggcagcactgcataattctcttactgtcatgccatccgtaagatgcttttctgtgactggtgagtactcaaccaagtcattctgagaatagtgtatgcggcgaccgagttgctcttgcccggcgtcaatacgggataataccgcgccacatagcagaactttaaaagtgctcatcattggaaaacgttcttcggggcgaaaactctcaaggatcttaccgctgttgagatccagttcgatgtaacccactcgtgcacccaactgatcttcagcatcttttactttcaccagcgtttctgggtgagcaaaaacaggaaggcaaaatgccgcaaaaaagggaataagggcgacacggaaatgttgaatactcatactcttcctttttcaatattattgaagcatttatcagggttattgtctcatgagcggatacatatttgaatgtatttagaaaaataaacaaataggggttccgcgcacatttccccgaaaagtgccacct

SEQ ID NO: 86 - DNA, 4810 bp, Artificial Sequence
  FSEL-IL24-1
gacgtctaagaaaccattattatcatgacattaacctataaaaataggcgtatcacgaggccctttcgtctcgcgcgtttcggtgatgacggtgaaaacctctgacacatgcagctcccggagacggtcacagcttgtctgtaagcggatgccgggagcagacaagcccgtcagggcgcgtcagcgggtgttggcgggtgtcggggctggcttaactatgcggcatcagagcagattgtactgagagtgcaccatatgtagaagaattgataaatatgaaaccttttaagaatatgaataaaataacaattaatcaaaaggataattgtatattagcaaatcgatgctttgttaaaatagatactcctagatacataccatcgacatccattagcagttctaatatcatcagaatacggaatcatgattttacattatctgaattattgtattcaccgtttcattttcaacagcctcagtttcaatatctccttcctgggtttgtattaacgtgtattgataaagtttcgaaacagcaaaaagaatgtaaatattgtatctctaatcgtggagatgatgatagtttaagcattaatctatttattccgactattaacaagtctatatatattattatcggtttacggatgaaaaatttttggaagcctaaattcgaaatagaataatgtttttatattatacatgtgctaaaagaatgatcgatacagtttaagtgaaagctagagaggggtttttaaatggtcatcggtttagtcatattcgtgtctgtaagcttggtaccgagctctccagacattgttgaattagatcgataaaaattaattaattacccgggttatcagagcttgtagaatttctgcatccaggtcagaagaatgtccacttccccaagggctttggtcagagctgcttctacgtccaactgtttgaatgctctccggaatagcagaaaccgcctgtgtgcactgtctctgatggaaaacatctcattttcttgactgggttgcagttgtgacacgatgagaacaaagttgttggccagagtagagaatgacttcagagtcctgacttcaactgttctattgtggtagtttttgaaaacagttttcaagtagaactccagcagggtgtggacaaggtaacagctctcagcatccgagacgttctgcagaacctcctgctgcagcagccgggcactcgtgatgttatcctgagcttgcatagtgtctttcacagcccagaaggcttcccacagtttctggggaacaacccccttcacttggcagggcccaaagtggaattcttggccctgggcccctgatacctggctccagagaagcagggtaaaacccaggcaagggagcacaaccatctgcatttgagaggctgtcgccagcaaaggagggcagaagggtctgctggctaaagtccacaggctttgcagcctctgttgaaaattcatggtggtcgacttcgagcttatttatattccaaaaaaaaaaaataaaatttcaatttttaagcttcgcaggatcctgcggccgccatcgtcggtgtgttgtctaacgtattggacatgtttatgtacgtagaagaaaataatgaagaggatgctagaatcaaggaggagcaagaactactgttgctatattaatacataattgaaaatctaccaacttaaatacaccgcctataaatttacaatgaaacacagattgtattctgaaggattgagtattagtaatgatttaaactcgataatcggtcaacaatctacaatggatacggatatagaaatagacgaagatgacatcatggaacttcttaatatattgactgagttaggttgtgatgtcgactttgatgaaaattttagcgatatagccgatgatattctagaatcgttgatagaacaggatgtataagtttttatgttaactaaatgtggccatttgcatcggtacctgcgggagcaaaatgtaggctggtagaaacactaccagaaaatatggattttagatccgatcatttaacaacatttgaatgttttaacgaaattatcactctagctaagaaatatatatacatagcatctttttgttgtaatcctctgaattctagaaaagtagaaaatatattctaatttattgcacgggatgagcgaaaaatacatcgtcacctgggacatgttgcagatccatgcacgtaaactcgcaagccgactgatgccttctgaacaatggaaaggcattattgccgtaagccgtggcggtctggtaccgggtgcgttactggcgcgtgaactgggtattcgtcatgtcgataccgtttgtatttccagctacgatcacgacaaccagcgcgagcttaaagtgctgaaacgcgcagaaggcgatggcgaaggcttcatcgttattgatgacctggtggataccggtggtactgcggttgcgattcgtgaaatgtatccaaaagcgcactttgtcaccatcttcgcaaaaccggctggtcgtccgctggttgatgactatgttgttgatatcccgcaagatacctggattgaacagccgtgggatatgggcgtcgtattcgtcccgccaatctccggtcgctaaggatcagcttggcgtaatcatggtcatagctgtttcctgtgtgaaattgttatccgctcacaattccacacaacatacgagccggaagcataaagtgtaaagcctggggtgcctaatgagtgagctaactcacattaattgcgttgcgctcactgcccgctttccagtcgggaaacctgtcgtgccagctgcattaatgaatcggccaacgcgcggggagaggcggtttgcgtattgggcgctcttccgcttcctcgctcactgactcgctgcgctcggtcgttcggctgcggcgagcggtatcagctcactcaaaggcggtaatacggttatccacagaatcaggggataacgcaggaaagaacatgtgagcaaaaggccagcaaaaggccaggaaccgtaaaaaggccgcgttgctggcgtttttccataggctccgcccccctgacgagcatcacaaaaatcgacgctcaagtcagaggtggcgaaacccgacaggactataaagataccaggcgtttccccctggaagctccctcgtgcgctctcctgttccgaccctgccgcttaccggatacctgtccgcctttctcccttcgggaagcgtggcgctttctcatagctcacgctgtaggtatctcagttcggtgtaggtcgttcgctccaagctgggctgtgtgcacgaaccccccgttcagcccgaccgctgcgccttatccggtaactatcgtcttgagtccaacccggtaagacacgacttatcgccactggcagcagccactggtaacaggattagcagagcgaggtatgtaggcggtgctacagagttcttgaagtggtggcctaactacggctacactagaaggacagtatttggtatctgcgctctgctgaagccagttaccttcggaaaaagagttggtagctcttgatccggcaaacaaaccaccgctggtagcggtggtttttttgtttgcaagcagcagattacgcgcagaaaaaaaggatctcaagaagatcctttgatcttttctacggggtctgacgctcagtggaacgaaaactcacgttaagggattttggtcatgagattatcaaaaaggatcttcacctagatccttttaaattaaaaatgaagttttaaatcaatctaaagtatatatgagtaaacttggtctgacagttaccaatgcttaatcagtgaggcacctatctcagcgatctgtctatttcgttcatccatagttgcctgactccccgtcgtgtagataactacgatacgggagggcttaccatctggccccagtgctgcaatgataccgcgagacccacgctcaccggctccagatttatcagcaataaaccagccagccggaagggccgagcgcagaagtggtcctgcaactttatccgcctccatccagtctattaattgttgccgggaagctagagtaagtagttcgccagttaatagtttgcgcaacgttgttgccattgctacaggcatcgtggtgtcacgctcgtcgtttggtatggcttcattcagctccggttcccaacgatcaaggcgagttacatgatcccccatgttgtgcaaaaaagcggttagctccttcggtcctccgatcgttgtcagaagtaagttggccgcagtgttatcactcatggttatggcagcactgcataattctcttactgtcatgccatccgtaagatgcttttctgtgactggtgagtactcaaccaagtcattctgagaatagtgtatgcggcgaccgagttgctcttgcccggcgtcaatacgggataataccgcgccacatagcagaactttaaaagtgctcatcattggaaaacgttcttcggggcgaaaactctcaaggatcttaccgctgttgagatccagttcgatgtaacccactcgtgcacccaactgatcttcagcatcttttactttcaccagcgtttctgggtgagcaaaaacaggaaggcaaaatgccgcaaaaaagggaataagggcgacacggaaatgttgaatactcatactcttcctttttcaatattattgaagcatttatcagggttattgtctcatgagcggatacatatttgaatgtatttagaaaaataaacaaataggggttccgcgcacatttccccgaaaagtgccacct

SEQ ID NO: 87 - DNA, 4972 bp, Artificial Sequence
  pCRII-dA35R-1
agcgcccaatacgcaaaccgcctctccccgcgcgttggccgattcattaatgcagctggcacgacaggtttcccgactggaaagcgggcagtgagcgcaacgcaattaatgtgagttagctcactcattaggcaccccaggctttacactttatgcttccggctcgtatgttgtgtggaattgtgagcggataacaatttcacacaggaaacagctatgaccatgattacgccaagctatttaggtgacactatagaatactcaagctatgcatcaagcttggtaccgagctcggatccactagtaacggccgccagtgtgctggaattcgcccttatgggcccatcgctatgtgctcgtctaaacggattattctcactaaatttattgttaagttctgtaataaacggatttgacttgctacaaatactggttttattataatttacgaaaggattggatgaatagttaggattctgtttggtatcttcattaagtacttcaacagtctccgtttcattaattactactgtagtgttctgataaatagtctgttcattacgatcattatttattagcagcgtgcttccagcaacactatcgtaaatgtgttctgtgctaggcgccataacattggattcgttatcccatattaaactaccagcgaagctatcatcgtccaatatctcattcctagaaatattatctacgtcattgttttgttccatagcactacagtgatcctcccagtctgattcgctatcagttgatttactagatttgctggaattagaactctttatcttttttaattttgtcatgataattttattgtcattatagacagtacgtatctttttcctacaaatatataatatataacatactaatattgttcccgcaactacggtcaccgtgataagaggtaccagcatcatttctgattgctcaatatacgtactactagttcaatatttattgttttattatttactttacaacttttatgataaaaaattactattgcatttcccatcaattatgatccatccattgccgtctgatatgcaggatccgagctcccgggaagcttggcggcgtacgttaacgacttattattaattcattttttgttgtcacttgtagaattttttaacacatagtacagattgagtacttttacatactgttttaaccagttttccagacttgtatatataacacgcttcagcatccgtcgtactgtttagttgtttaaaatttgttaatttactaatatctatatctttatcattattaatatctaaccatttatcattggtcttttttaaacttacccaataatctttataaaaaatactaaacaatactctcagatgtctagtatcaggtctaggcaatctagctcgtaatttacgacactgataaaccgcattatctgtagacattttaatgttagtatctaaataacaatgtttatcgtattgtatccatccattggcgcaagcactaggcatcagttcttctttgtaatgcagaaatgttcctatgccactaataatggttgagagtatcatcattatagcggccggcaccgacaacttcttaaacctacttacagtttgtctattaagcgatttcatttattaatgtacaaaaataaatattagttcattgttttaacacaaaaatactttctaacttcttgtgatacatcagaatcttgataatcggatgtagtttttgtaattggattaccatcagatccccatgtatcctcactcgagataagggcgaattctgcagatatccatcacactggcggccgctcgagcatgcatctagagggcccaattcgccctatagtgagtcgtattacaattcactggccgtcgttttacaacgtcgtgactgggaaaaccctggcgttacccaacttaatcgccttgcagcacatccccctttcgccagctggcgtaatagcgaagaggcccgcaccgatcgcccttcccaacagttgcgcagcctatacgtacggcagtttaaggtttacacctataaaagagagagccgttatcgtctgtttgtggatgtacagagtgatattattgacacgccggggcgacggatggtgatccccctggccagtgcacgtctgctgtcagataaagtctcccgtgaactttacccggtggtgcatatcggggatgaaagctggcgcatgatgaccaccgatatggccagtgtgccggtctccgttatcggggaagaagtggctgatctcagccaccgcgaaaatgacatcaaaaacgccattaacctgatgttctggggaatataaatgtcaggcatgagattatcaaaaaggatcttcacctagatccttttcacgtagaaagccagtccgcagaaacggtgctgaccccggatgaatgtcagctactgggctatctggacaagggaaaacgcaagcgcaaagagaaagcaggtagcttgcagtgggcttacatggcgatagctagactgggcggttttatggacagcaagcgaaccggaattgccagctggggcgccctctggtaaggttgggaagccctgcaaagtaaactggatggctttctcgccgccaaggatctgatggcgcaggggatcaagctctgatcaagagacaggatgaggatcgtttcgcatgattgaacaagatggattgcacgcaggttctccggccgcttgggtggagaggctattcggctatgactgggcacaacagacaatcggctgctctgatgccgccgtgttccggctgtcagcgcaggggcgcccggttctttttgtcaagaccgacctgtccggtgccctgaatgaactgcaagacgaggcagcgcggctatcgtggctggccacgacgggcgttccttgcgcagctgtgctcgacgttgtcactgaagcgggaagggactggctgctattgggcgaagtgccggggcaggatctcctgtcatctcaccttgctcctgccgagaaagtatccatcatggctgatgcaatgcggcggctgcatacgcttgatccggctacctgcccattcgaccaccaagcgaaacatcgcatcgagcgagcacgtactcggatggaagccggtcttgtcgatcaggatgatctggacgaagagcatcaggggctcgcgccagccgaactgttcgccaggctcaaggcgagcatgcccgacggcgaggatctcgtcgtgacccatggcgatgcctgcttgccgaatatcatggtggaaaatggccgcttttctggattcatcgactgtggccggctgggtgtggcggaccgctatcaggacatagcgttggctacccgtgatattgctgaagagcttggcggcgaatgggctgaccgcttcctcgtgctttacggtatcgccgctcccgattcgcagcgcatcgccttctatcgccttcttgacgagttcttctgaattattaacgcttacaatttcctgatgcggtattttctccttacgcatctgtgcggtatttcacaccgcatacaggtggcacttttcggggaaatgtgcgcggaacccctatttgtttatttttctaaatacattcaaatatgtatccgctcatgagacaataaccctgataaatgcttcaataatagcacgtgaggagggccaccatggccaagttgaccagtgccgttccggtgctcaccgcgcgcgacgtcgccggagcggtcgagttctggaccgaccggctcgggttctcccgggacttcgtggaggacgacttcgccggtgtggtccgggacgacgtgaccctgttcatcagcgcggtccaggaccaggtggtgccggacaacaccctggcctgggtgtgggtgcgcggcctggacgagctgtacgccgagtggtcggaggtcgtgtccacgaacttccgggacgcctccgggccggccatgaccgagatcggcgagcagccgtgggggcgggagttcgccctgcgcgacccggccggcaactgcgtgcacttcgtggccgaggagcaggactgacacgtgctaaaacttcatttttaatttaaaaggatctaggtgaagatcctttttgataatctcatgaccaaaatcccttaacgtgagttttcgttccactgagcgtcagaccccgtagaaaagatcaaaggatcttcttgagatcctttttttctgcgcgtaatctgctgcttgcaaacaaaaaaaccaccgctaccagcggtggtttgtttgccggatcaagagctaccaactctttttccgaaggtaactggcttcagcagagcgcagataccaaatactgtccttctagtgtagccgtagttaggccaccacttcaagaactctgtagcaccgcctacatacctcgctctgctaatcctgttaccagtggctgctgccagtggcgataagtcgtgtcttaccgggttggactcaagacgatagttaccggataaggcgcagcggtcgggctgaacggggggttcgtgcacacagcccagcttggagcgaacgacctacaccgaactgagatacctacagcgtgagctatgagaaagcgccacgcttcccgaagggagaaaggcggacaggtatccggtaagcggcagggtcggaacaggagagcgcacgagggagcttccagggggaaacgcctggtatctttatagtcctgtcgggtttcgccacctctgacttgagcgtcgatttttgtgatgctcgtcaggggggcggagcctatggaaaaacgccagcaacgcggcctttttacggttcctgggcttttgctggccttttgctcacatgttctttcctgcgttatcccctgattctgtggataaccgtattaccgcctttgagtgagctgataccgctcgccgcagccgaacgaccgagcgcagcgagtcagtgagcgaggaagcggaag

SEQ ID NO: 88 - DNA, 4420 bp, Artificial Sequence
  pCR-dTK-gpt1
agcgcccaatacgcaaaccgcctctccccgcgcgttggccgattcattaatgcagctggcacgacaggtttcccgactggaaagcgggcagtgagcgcaacgcaattaatgtgagttagctcactcattaggcaccccaggctttacactttatgcttccggctcgtatgttgtgtggaattgtgagcggataacaatttcacacaggaaacagctatgaccatgattacgccaagctctagtaacggccgccagtgtgctggaattctagaaaagtagaaaatatattctaatttattgcacgggatgagcgaaaaatacatcgtcacctgggacatgttgcagatccatgcacgtaaactcgcaagccgactgatgccttctgaacaatggaaaggcattattgccgtaagccgtggcggtctggtaccgggtgcgttactggcgcgtgaactgggtattcgtcatgtcgataccgtttgtatttccagctacgatcacgacaaccagcgcgagcttaaagtgctgaaacgcgcagaaggcgatggcgaaggcttcatcgttattgatgacctggtggataccggtggtactgcggttgcgattcgtgaaatgtatccaaaagcgcactttgtcaccatcttcgcaaaaccggctggtcgtccgctggttgatgactatgttgttgatatcccgcaagatacctggattgaacagccgtgggatatgggcgtcgtattcgtcccgccaatctccggtcgctaaggatcagcttggcgtaatcaagccgaattctgcagatatccatcacactggcggccgctcgagcatgcatctagagggcccaattcgccctatagtgagtcgtattacaattcactggccgtcgttttacaacgtcgtgactgggaaaaccctggcgttacccaacttaatcgccttgcagcacatccccctttcgccagctggcgtaatagcgaagaggcccgcaccgatcgcccttcccaacagttgcgcagcctgaatggcgaatggacgcgccctgtagcggcgcattaagcgcggcgggtgtggtggttacgcgcagcgtgaccgctacacttgccagcgccctagcgcccgctcctttcgctttcttcccttcctttctcgccacgttcgccggctttccccgtcaagctctaaatcgggggctccctttagggttccgatttagtgctttacggcacctcgaccccaaaaaacttgattagggtgatggttcacgtagtgggccatcgccctgatagacggtttttcgccctttgacgttggagtccacgttctttaatagtggactcttgttccaaactggaacaacactcaaccctatctcggtctattcttttgatttataagggattttgccgatttcggcctattggttaaaaaatgagctgatttaacaaaaatttaacgcgaattttaacaaaattcagggcgcaagggctgctaaaggaagcggaacacgtagaaagccagtccgcagaaacggtgctgaccccggatgaatgtcagctactgggctatctggacaagggaaaacgcaagcgcaaagagaaagcaggtagcttgcagtgggcttacatggcgatagctagactgggcggttttatggacagcaagcgaaccggaattgccagctggggcgccctctggtaaggttgggaagccctgcaaagtaaactggatggctttcttgccgccaaggatctgatggcgcaggggatcaagatctgatcaagagacaggatgaggatcgtttcgcatgattgaacaagatggattgcacgcaggttctccggccgcttgggtggagaggctattcggctatgactgggcacaacagacaatcggctgctctgatgccgccgtgttccggctgtcagcgcaggggcgcccggttctttttgtcaagaccgacctgtccggtgccctgaatgaactgcaggacgaggcagcgcggctatcgtggctggccacgacgggcgttccttgcgcagctgtgctcgacgttgtcactgaagcgggaagggactggctgctattgggcgaagtgccggggcaggatctcctgtcatcccaccttgctcctgccgagaaagtatccatcatggctgatgcaatgcggcggctgcatacgcttgatccggctacctgcccattcgaccaccaagcgaaacatcgcatcgagcgagcacgtactcggatggaagccggtcttgtcgatcaggatgatctggacgaagagcatcaggggctcgcgccagccgaactgttcgccaggctcaaggcgcgcatgcccgacggcgaggatctcgtcgtgacccatggcgatgcctgcttgccgaatatcatggtggaaaatggccgcttttctggattcatcgactgtggccggctgggtgtggcggaccgctatcaggacatagcgttggctacccgtgatattgctgaagagcttggcggcgaatgggctgaccgcttcctcgtgctttacggtatcgccgctcccgattcgcagcgcatcgccttctatcgccttcttgacgagttcttctgaattgaaaaaggaagagtatgagtattcaacatttccgtgtcgcccttattcccttttttgcggcattttgccttcctgtttttgctcacccagaaacgctggtgaaagtaaaagatgctgaagatcagttgggtgcacgagtgggttacatcgaactggatctcaacagcggtaagatccttgagagttttcgccccgaagaacgttttccaatgatgagcacttttaaagttctgctatgtggcgcggtattatcccgtattgacgccgggcaagagcaactcggtcgccgcatacactattctcagaatgacttggttgagtactcaccagtcacagaaaagcatcttacggatggcatgacagtaagagaattatgcagtgctgccataaccatgagtgataacactgcggccaacttacttctgacaacgatcggaggaccgaaggagctaaccgcttttttgcacaacatgggggatcatgtaactcgccttgatcgttgggaaccggagctgaatgaagccataccaaacgacgagcgtgacaccacgatgcctgtagcaatggcaacaacgttgcgcaaactattaactggcgaactacttactctagcttcccggcaacaattaatagactggatggaggcggataaagttgcaggaccacttctgcgctcggcccttccggctggctggtttattgctgataaatctggagccggtgagcgtgggtctcgcggtatcattgcagcactggggccagatggtaagccctcccgtatcgtagttatctacacgacggggagtcaggcaactatggatgaacgaaatagacagatcgctgagataggtgcctcactgattaagcattggtaactgtcagaccaagtttactcatatatactttagattgatttaaaacttcatttttaatttaaaaggatctaggtgaagatcctttttgataatctcatgaccaaaatcccttaacgtgagttttcgttccactgagcgtcagaccccgtagaaaagatcaaaggatcttcttgagatcctttttttctgcgcgtaatctgctgcttgcaaacaaaaaaaccaccgctaccagcggtggtttgtttgccggatcaagagctaccaactctttttccgaaggtaactggcttcagcagagcgcagataccaaatactgttcttctagtgtagccgtagttaggccaccacttcaagaactctgtagcaccgcctacatacctcgctctgctaatcctgttaccagtggctgctgccagtggcgataagtcgtgtcttaccgggttggactcaagacgatagttaccggataaggcgcagcggtcgggctgaacggggggttcgtgcacacagcccagcttggagcgaacgacctacaccgaactgagatacctacagcgtgagctatgagaaagcgccacgcttcccgaagggagaaaggcggacaggtatccggtaagcggcagggtcggaacaggagagcgcacgagggagcttccagggggaaacgcctggtatctttatagtcctgtcgggtttcgccacctctgacttgagcgtcgatttttgtgatgctcgtcaggggggcggagcctatggaaaaacgccagcaacgcggcctttttacggttcctggccttttgctggccttttgctcacatgttctttcctgcgttatcccctgattctgtggataaccgtattaccgcctttgagtgagctgataccgctcgccgcagccgaacgaccgagcgcagcgagtcagtgagcgaggaagcggaag

SEQ ID NO: 89 - DNA, 5845 bp, Artificial Sequence
  pCR-gpt-dA35R-6
agcgcccaatacgcaaaccgcctctccccgcgcgttggccgattcattaatgcagctggcacgacaggtttcccgactggaaagcgggcagtgagcgcaacgcaattaatgtgagttagctcactcattaggcaccccaggctttacactttatgcttccggctcgtatgttgtgtggaattgtgagcggataacaatttcacacaggaaacagctatgaccatgattacgccaagctctagtaacggccgccagtgtgctggaattctagaaaagtagaaaatatattctaatttattgcacgggatgagcgaaaaatacatcgtcacctgggacatgttgcagatccatgcacgtaaactcgcaagccgactgatgccttctgaacaatggaaaggcattattgccgtaagccgtggcggtctggtaccgggtgcgttactggcgcgtgaactgggtattcgtcatgtcgataccgtttgtatttccagctacgatcacgacaaccagcgcgagcttaaagtgctgaaacgcgcagaaggcgatggcgaaggcttcatcgttattgatgacctggtggataccggtggtactgcggttgcgattcgtgaaatgtatccaaaagcgcactttgtcaccatcttcgcaaaaccggctggtcgtccgctggttgatgactatgttgttgatatcccgcaagatacctggattgaacagccgtgggatatgggcgtcgtattcgtcccgccaatctccggtcgctaaggatcagcttggcgtaatcaagccgaattctgcagatatccatcacactggcggccgctcgagtgaggatacatggggatctgatggtaatccaattacaaaaactacatccgattatcaagattctgatgtatcacaagaagttagaaagtatttttgtgttaaaacaatgaactaatatttatttttgtacattaataaatgaaatcgcttaatagacaaactgtaagtaggtttaagaagttgtcggtgccggccgctataatgatgatactctcaaccattattagtggcataggaacatttctgcattacaaagaagaactgatgcctagtgcttgcgccaatggatggatacaatacgataaacattgttatttagatactaacattaaaatgtctacagataatgcggtttatcagtgtcgtaaattacgagctagattgcctagacctgatactagacatctgagagtattgtttagtattttttataaagattattgggtaagtttaaaaaagaccaatgataaatggttagatattaataatgataaagatatagatattagtaaattaacaaattttaaacaactaaacagtacgacggatgctgaagcgtgttatatatacaagtctggaaaactggttaaaacagtatgtaaaagtactcaatctgtactatgtgttaaaaaattctacaagtgacaacaaaaaatgaattaataataagtcgttaacgtacgccgccaagcttcccgggagctcggatcctgcatatcagacggcaatggatggatcataattgatgggaaatgcaatagtaattttttatcataaaagttgtaaagtaaataataaaacaataaatattgaactagtagtacgtatattgagcaatcagaaatgatgctggtacctcttatcacggtgaccgtagttgcgggaacaatattagtatgttatatattatatatttgtaggaaaaagatacgtactgtctataatgacaataaaattatcatgacaaaattaaaaaagataaagagttctaattccagcaaatctagtaaatcaactgatagcgaatcagactgggaggatcactgtagtgctatggaacaaaacaatgacgtagataatatttctaggaatgagatattggacgatgatagcttcgctggtagtttaatatgggataacgaatccaatgttatggcgcctagcacagaacacatttacgatagtgttgctggaagcacgctgctaataaataatgatcgtaatgaacagactatttatcagaacactacagtagtaattaatgaaacggagactgttgaagtacttaatgaagataccaaacagaatcctaactattcatccaatcctttcgtaaattataataaaaccagtatttgtagcaagtcaaatccgtttattacagaacttaacaataaatttagtgagaataatccgtttagacgagcacatagcgatgggcccaattcgccctatagtgagtcgtattacaattcactggccgtcgttttacaacgtcgtgactgggaaaaccctggcgttacccaacttaatcgccttgcagcacatccccctttcgccagctggcgtaatagcgaagaggcccgcaccgatcgcccttcccaacagttgcgcagcctgaatggcgaatggacgcgccctgtagcggcgcattaagcgcggcgggtgtggtggttacgcgcagcgtgaccgctacacttgccagcgccctagcgcccgctcctttcgctttcttcccttcctttctcgccacgttcgccggctttccccgtcaagctctaaatcgggggctccctttagggttccgatttagtgctttacggcacctcgaccccaaaaaacttgattagggtgatggttcacgtagtgggccatcgccctgatagacggtttttcgccctttgacgttggagtccacgttctttaatagtggactcttgttccaaactggaacaacactcaaccctatctcggtctattcttttgatttataagggattttgccgatttcggcctattggttaaaaaatgagctgatttaacaaaaatttaacgcgaattttaacaaaattcagggcgcaagggctgctaaaggaagcggaacacgtagaaagccagtccgcagaaacggtgctgaccccggatgaatgtcagctactgggctatctggacaagggaaaacgcaagcgcaaagagaaagcaggtagcttgcagtgggcttacatggcgatagctagactgggcggttttatggacagcaagcgaaccggaattgccagctggggcgccctctggtaaggttgggaagccctgcaaagtaaactggatggctttcttgccgccaaggatctgatggcgcaggggatcaagatctgatcaagagacaggatgaggatcgtttcgcatgattgaacaagatggattgcacgcaggttctccggccgcttgggtggagaggctattcggctatgactgggcacaacagacaatcggctgctctgatgccgccgtgttccggctgtcagcgcaggggcgcccggttctttttgtcaagaccgacctgtccggtgccctgaatgaactgcaggacgaggcagcgcggctatcgtggctggccacgacgggcgttccttgcgcagctgtgctcgacgttgtcactgaagcgggaagggactggctgctattgggcgaagtgccggggcaggatctcctgtcatcccaccttgctcctgccgagaaagtatccatcatggctgatgcaatgcggcggctgcatacgcttgatccggctacctgcccattcgaccaccaagcgaaacatcgcatcgagcgagcacgtactcggatggaagccggtcttgtcgatcaggatgatctggacgaagagcatcaggggctcgcgccagccgaactgttcgccaggctcaaggcgcgcatgcccgacggcgaggatctcgtcgtgacccatggcgatgcctgcttgccgaatatcatggtggaaaatggccgcttttctggattcatcgactgtggccggctgggtgtggcggaccgctatcaggacatagcgttggctacccgtgatattgctgaagagcttggcggcgaatgggctgaccgcttcctcgtgctttacggtatcgccgctcccgattcgcagcgcatcgccttctatcgccttcttgacgagttcttctgaattgaaaaaggaagagtatgagtattcaacatttccgtgtcgcccttattcccttttttgcggcattttgccttcctgtttttgctcacccagaaacgctggtgaaagtaaaagatgctgaagatcagttgggtgcacgagtgggttacatcgaactggatctcaacagcggtaagatccttgagagttttcgccccgaagaacgttttccaatgatgagcacttttaaagttctgctatgtggcgcggtattatcccgtattgacgccgggcaagagcaactcggtcgccgcatacactattctcagaatgacttggttgagtactcaccagtcacagaaaagcatcttacggatggcatgacagtaagagaattatgcagtgctgccataaccatgagtgataacactgcggccaacttacttctgacaacgatcggaggaccgaaggagctaaccgcttttttgcacaacatgggggatcatgtaactcgccttgatcgttgggaaccggagctgaatgaagccataccaaacgacgagcgtgacaccacgatgcctgtagcaatggcaacaacgttgcgcaaactattaactggcgaactacttactctagcttcccggcaacaattaatagactggatggaggcggataaagttgcaggaccacttctgcgctcggcccttccggctggctggtttattgctgataaatctggagccggtgagcgtgggtctcgcggtatcattgcagcactggggccagatggtaagccctcccgtatcgtagttatctacacgacggggagtcaggcaactatggatgaacgaaatagacagatcgctgagataggtgcctcactgattaagcattggtaactgtcagaccaagtttactcatatatactttagattgatttaaaacttcatttttaatttaaaaggatctaggtgaagatcctttttgataatctcatgaccaaaatcccttaacgtgagttttcgttccactgagcgtcagaccccgtagaaaagatcaaaggatcttcttgagatcctttttttctgcgcgtaatctgctgcttgcaaacaaaaaaaccaccgctaccagcggtggtttgtttgccggatcaagagctaccaactctttttccgaaggtaactggcttcagcagagcgcagataccaaatactgttcttctagtgtagccgtagttaggccaccacttcaagaactctgtagcaccgcctacatacctcgctctgctaatcctgttaccagtggctgctgccagtggcgataagtcgtgtcttaccgggttggactcaagacgatagttaccggataaggcgcagcggtcgggctgaacggggggttcgtgcacacagcccagcttggagcgaacgacctacaccgaactgagatacctacagcgtgagctatgagaaagcgccacgcttcccgaagggagaaaggcggacaggtatccggtaagcggcagggtcggaacaggagagcgcacgagggagcttccagggggaaacgcctggtatctttatagtcctgtcgggtttcgccacctctgacttgagcgtcgatttttgtgatgctcgtcaggggggcggagcctatggaaaaacgccagcaacgcggcctttttacggttcctggccttttgctggccttttgctcacatgttctttcctgcgttatcccctgattctgtggataaccgtattaccgcctttgagtgagctgataccgctcgccgcagccgaacgaccgagcgcagcgagtcagtgagcgaggaagcggaag

SEQ ID NO: 90 - protein, 13 aa, Artificial Sequence
  sIL-6R Linker Sequence
RGGGGSGGGGSVE

SEQ ID NO: 91 - DNA, 27 bp, Artificial Sequence
  hu-tTF-RGDrev-cDNA primer
ctttctacacttgtgtagagatatagc

SEQ ID NO: 92 - DNA, 960 bp, Artificial Sequence
  tTF-RGD cDNA
ctttctacacttgtgtagagatatagccaggatgatgacaaggatgatgaccacaaataccacagctccaatgatgtagaatatttctctgaattcccctttctcctggcccatacactctaccgggctgtctgtactcttccggttaactgttcgggagggaatcactgcttgaacactgaaacagtagttttctcctttatccacatcaatcaaaaactcattagtgtttgttttggctgttttctttcctgaacttgaagatttccaataataaagtgtataaattaagtccttgccaaaaacatcccggaggcttaggaaagtgttgttccttctgactaaagtccgttcatcttctacggtcacattcacttttgttcccacctgttcaaaactctgaattgttggctgtccgaggtttgtctccaggtaaggtgtgaactctggggagttctcatacagaggctccccagcagaaccggtgctctccacattccctgccgggtaggagaagacccgtgccaagtacgtctgcttcacatccttcacaatctcgtcggtgaggtcacactctgtgtctgttgtgtaaaagcatttgcttttccaatctcctgacttagtgcttatttgaacagtgtagacttgattgacgggtttgggttcccactccaaaattgtcttgaaattagttgatttccaagttaaattatatgctgccacagtatttgtagtgcctgaagcgccggccacctgggcgaagacccagccgagcaggagcgtccgagcgacggcggtctcggggcgcgggacccggggccaggcaggggtctccatgtctaccagttggcggcgagatcgagcgggttccgtggcgcccgtggggctggggaggttgggctgaaggcgccctgggccggccagagggagtgcgagggggtgcggggagctcgcagtctt

SEQ ID NO: 93 - protein, 264 aa, Artificial Sequence
  tTF-RGD protein
METPAWPRVPRPETAVARTLLLGWVFAQVAGASGTTNTVAAYNLTWKSTNFKTILEWEPKPVNQVYTVQISTKSGDWKSKCFYTTDTECDLTDEIVKDVKQTYLARVFSYPAGNVESTGSAGEPLYENSPEFTPYLETNLGQPTIQSFEQVGTKVNVTVEDERTLVRRNNTFLSLRDVFGKDLIYTLYYWKSSSSGKKTAKTNTNEFLIDVDKGENYCFSVQAVIPSRTVNRKSTDSPVECMGQEKGEFRGRGDSPDYKDDDDK

SEQ ID NO: 94 - DNA, 4311 bp, Artificial Sequence
  pCRII-tTF-RGD vector
aagggcgaattctgcagatatccatcacactggcggccgctcgagcatgcatctagagggcccaattcgccctatagtgagtcgtattacaattcactggccgtcgttttacaacgtcgtgactgggaaaaccctggcgttacccaacttaatcgccttgcagcacatccccctttcgccagctggcgtaatagcgaagaggcccgcaccgatcgcccttcccaacagttgcgcagcctatacgtacggcagtttaaggtttacacctataaaagagagagccgttatcgtctgtttgtggatgtacagagtgatattattgacacgccggggcgacggatggtgatccccctggccagtgcacgtctgctgtcagataaagtctcccgtgaactttacccggtggtgcatatcggggatgaaagctggcgcatgatgaccaccgatatggccagtgtgccggtctccgttatcggggaagaagtggctgatctcagccaccgcgaaaatgacatcaaaaacgccattaacctgatgttctggggaatataaatgtcaggcatgagattatcaaaaaggatcttcacctagatccttttcacgtagaaagccagtccgcagaaacggtgctgaccccggatgaatgtcagctactgggctatctggacaagggaaaacgcaagcgcaaagagaaagcaggtagcttgcagtgggcttacatggcgatagctagactgggcggttttatggacagcaagcgaaccggaattgccagctggggcgccctctggtaaggttgggaagccctgcaaagtaaactggatggctttctcgccgccaaggatctgatggcgcaggggatcaagctctgatcaagagacaggatgaggatcgtttcgcatgattgaacaagatggattgcacgcaggttctccggccgcttgggtggagaggctattcggctatgactgggcacaacagacaatcggctgctctgatgccgccgtgttccggctgtcagcgcaggggcgcccggttctttttgtcaagaccgacctgtccggtgccctgaatgaactgcaagacgaggcagcgcggctatcgtggctggccacgacgggcgttccttgcgcagctgtgctcgacgttgtcactgaagcgggaagggactggctgctattgggcgaagtgccggggcaggatctcctgtcatctcaccttgctcctgccgagaaagtatccatcatggctgatgcaatgcggcggctgcatacgcttgatccggctacctgcccattcgaccaccaagcgaaacatcgcatcgagcgagcacgtactcggatggaagccggtcttgtcgatcaggatgatctggacgaagagcatcaggggctcgcgccagccgaactgttcgccaggctcaaggcgagcatgcccgacggcgaggatctcgtcgtgacccatggcgatgcctgcttgccgaatatcatggtggaaaatggccgcttttctggattcatcgactgtggccggctgggtgtggcggaccgctatcaggacatagcgttggctacccgtgatattgctgaagagcttggcggcgaatgggctgaccgcttcctcgtgctttacggtatcgccgctcccgattcgcagcgcatcgccttctatcgccttcttgacgagttcttctgaattattaacgcttacaatttcctgatgcggtattttctccttacgcatctgtgcggtatttcacaccgcatacaggtggcacttttcggggaaatgtgcgcggaacccctatttgtttatttttctaaatacattcaaatatgtatccgctcatgagacaataaccctgataaatgcttcaataatagcacgtgaggagggccaccatggccaagttgaccagtgccgttccggtgctcaccgcgcgcgacgtcgccggagcggtcgagttctggaccgaccggctcgggttctcccgggacttcgtggaggacgacttcgccggtgtggtccgggacgacgtgaccctgttcatcagcgcggtccaggaccaggtggtgccggacaacaccctggcctgggtgtgggtgcgcggcctggacgagctgtacgccgagtggtcggaggtcgtgtccacgaacttccgggacgcctccgggccggccatgaccgagatcggcgagcagccgtgggggcgggagttcgccctgcgcgacccggccggcaactgcgtgcacttcgtggccgaggagcaggactgacacgtgctaaaacttcatttttaatttaaaaggatctaggtgaagatcctttttgataatctcatgaccaaaatcccttaacgtgagttttcgttccactgagcgtcagaccccgtagaaaagatcaaaggatcttcttgagatcctttttttctgcgcgtaatctgctgcttgcaaacaaaaaaaccaccgctaccagcggtggtttgtttgccggatcaagagctaccaactctttttccgaaggtaactggcttcagcagagcgcagataccaaatactgtccttctagtgtagccgtagttaggccaccacttcaagaactctgtagcaccgcctacatacctcgctctgctaatcctgttaccagtggctgctgccagtggcgataagtcgtgtcttaccgggttggactcaagacgatagttaccggataaggcgcagcggtcgggctgaacggggggttcgtgcacacagcccagcttggagcgaacgacctacaccgaactgagatacctacagcgtgagctatgagaaagcgccacgcttcccgaagggagaaaggcggacaggtatccggtaagcggcagggtcggaacaggagagcgcacgagggagcttccagggggaaacgcctggtatctttatagtcctgtcgggtttcgccacctctgacttgagcgtcgatttttgtgatgctcgtcaggggggcggagcctatggaaaaacgccagcaacgcggcctttttacggttcctgggcttttgctggccttttgctcacatgttctttcctgcgttatcccctgattctgtggataaccgtattaccgcctttgagtgagctgataccgctcgccgcagccgaacgaccgagcgcagcgagtcagtgagcgaggaagcggaagagcgcccaatacgcaaaccgcctctccccgcgcgttggccgattcattaatgcagctggcacgacaggtttcccgactggaaagcgggcagtgagcgcaacgcaattaatgtgagttagctcactcattaggcaccccaggctttacactttatgcttccggctcgtatgttgtgtggaattgtgagcggataacaatttcacacaggaaacagctatgaccatgattacgccaagctatttaggtgacactatagaatactcaagctatgcatcaagcttggtaccgagctcggatccactagtaacggccgccagtgtgctggaattcgcccttttaattaatattatggagaatcacctcttcctctgaattcccctttctcctggcccatacactctaccgggctgtctgtactcttccggttaactgttcgggagggaatcactgcttgaacactgaaacagtagttttctcctttatccacatcaatcaaaaactcattagtgtttgttttggctgttttctttcctgaacttgaagatttccaataataaagtgtataaattaagtccttgccaaaaacatcccggaggcttaggaaagtgttgttccttctgactaaagtccgttcatcttctacggtcacattcacttttgttcccacctgttcaaaactctgaattgttggctgtccgaggtttgtctccaggtaaggtgtgaactctggggagttctcatacagaggctccccagcagaaccggtgctctccacattccctgccgggtaggagaagacccgtgccaagtacgtctgcttcacatccttcacaatctcgtcggtgaggtcacactctgtgtctgttgtgtaaaagcatttgcttttccaatctcctgacttagtgcttatttgaacagtgtagacttgattgacgggtttgggttcccactccaaaattgtcttgaaattagttgatttccaagttaaattatatgctgccacagtatttgtagtgcctgaagcgccggccacctgggcgaagacccagccgagcaggagcgtccgagcgacggcggtctcggggcgcgggacccggggccaggcaggggtctccatggtgggtcgac

SEQ ID NO: 95 - DNA, 6321 bp, Artificial Sequence
  pCR-TK-SE-tTF-RGD vector
taatttttatcgatctaattcaacaatgtctggagagctcggatccttctgtgagcgtatggcaaacgaaggaaaaatagttatagtagccgcactcgatgggacatttcaacgtaaaccgtttaataatattttgaatcttattccattatctgaaatggtggtaaaactaactgctgtgtgtatgaaatgctttaaggaggcttccttttctaaacgattgggtgaggaaaccgagatagagataataggaggtaatgatatgtatcaatcggtgtgtagaaagtgttacgtcggctcataatattatattttttatctaaaaaactaaaaataaacattgattaaattttaatataatacttaaaaatggatgttgtgtcgttagataaaccgtttatgtattttgaggaaattgataatgagttagattacgaaccagaaagtgcaaatgaggtcgcaaaaaaactgccgtatcaaggacagttaaaactattactaggagaattattttttcttagtaagttacagcgacacggtatattagatggtgccaccgtagtgtactagttaacggccgccagtgtgctggaattctagaaaagtagaaaatatattctaatttattgcacgggatgagcgaaaaatacatcgtcacctgggacatgttgcagatccatgcacgtaaactcgcaagccgactgatgccttctgaacaatggaaaggcattattgccgtaagccgtggcggtctggtaccgggtgcgttactggcgcgtgaactgggtattcgtcatgtcgataccgtttgtatttccagctacgatcacgacaaccagcgcgagcttaaagtgctgaaacgcgcagaaggcgatggcgaaggcttcatcgttattgatgacctggtggataccggtggtactgcggttgcgattcgtgaaatgtatccaaaagcgcactttgtcaccatcttcgcaaaaccggctggtcgtccgctggttgatgactatgttgttgatatcccgcaagatacctggattgaacagccgtgggatatgggcgtcgtattcgtcccgccaatctccggtcgctaaggatcagcttggcgtaatcaagccgaattctgcagatatccatcacactggcggccgctcgagcatgcatctagagggcccaattcgccctatagtgagtcgtattacaattcactggccgtcgttttacaacgtcgtgactgggaaaaccctggcgttacccaacttaatcgccttgcagcacatccccctttcgccagctggcgtaatagcgaagaggcccgcaccgatcgcccttcccaacagttgcgcagcctgaatggcgaatggacgcgccctgtagcggcgcattaagcgcggcgggtgtggtggttacgcgcagcgtgaccgctacacttgccagcgccctagcgcccgctcctttcgctttcttcccttcctttctcgccacgttcgccggctttccccgtcaagctctaaatcgggggctccctttagggttccgatttagtgctttacggcacctcgaccccaaaaaacttgattagggtgatggttcacgtagtgggccatcgccctgatagacggtttttcgccctttgacgttggagtccacgttctttaatagtggactcttgttccaaactggaacaacactcaaccctatctcggtctattcttttgatttataagggattttgccgatttcggcctattggttaaaaaatgagctgatttaacaaaaatttaacgcgaattttaacaaaattcagggcgcaagggctgctaaaggaagcggaacacgtagaaagccagtccgcagaaacggtgctgaccccggatgaatgtcagctactgggctatctggacaagggaaaacgcaagcgcaaagagaaagcaggtagcttgcagtgggcttacatggcgatagctagactgggcggttttatggacagcaagcgaaccggaattgccagctggggcgccctctggtaaggttgggaagccctgcaaagtaaactggatggctttcttgccgccaaggatctgatggcgcaggggatcaagatctgatcaagagacaggatgaggatcgtttcgcatgattgaacaagatggattgcacgcaggttctccggccgcttgggtggagaggctattcggctatgactgggcacaacagacaatcggctgctctgatgccgccgtgttccggctgtcagcgcaggggcgcccggttctttttgtcaagaccgacctgtccggtgccctgaatgaactgcaggacgaggcagcgcggctatcgtggctggccacgacgggcgttccttgcgcagctgtgctcgacgttgtcactgaagcgggaagggactggctgctattgggcgaagtgccggggcaggatctcctgtcatcccaccttgctcctgccgagaaagtatccatcatggctgatgcaatgcggcggctgcatacgcttgatccggctacctgcccattcgaccaccaagcgaaacatcgcatcgagcgagcacgtactcggatggaagccggtcttgtcgatcaggatgatctggacgaagagcatcaggggctcgcgccagccgaactgttcgccaggctcaaggcgcgcatgcccgacggcgaggatctcgtcgtgacccatggcgatgcctgcttgccgaatatcatggtggaaaatggccgcttttctggattcatcgactgtggccggctgggtgtggcggaccgctatcaggacatagcgttggctacccgtgatattgctgaagagcttggcggcgaatgggctgaccgcttcctcgtgctttacggtatcgccgctcccgattcgcagcgcatcgccttctatcgccttcttgacgagttcttctgaattgaaaaaggaagagtatgagtattcaacatttccgtgtcgcccttattcccttttttgcggcattttgccttcctgtttttgctcacccagaaacgctggtgaaagtaaaagatgctgaagatcagttgggtgcacgagtgggttacatcgaactggatctcaacagcggtaagatccttgagagttttcgccccgaagaacgttttccaatgatgagcacttttaaagttctgctatgtggcgcggtattatcccgtattgacgccgggcaagagcaactcggtcgccgcatacactattctcagaatgacttggttgagtactcaccagtcacagaaaagcatcttacggatggcatgacagtaagagaattatgcagtgctgccataaccatgagtgataacactgcggccaacttacttctgacaacgatcggaggaccgaaggagctaaccgcttttttgcacaacatgggggatcatgtaactcgccttgatcgttgggaaccggagctgaatgaagccataccaaacgacgagcgtgacaccacgatgcctgtagcaatggcaacaacgttgcgcaaactattaactggcgaactacttactctagcttcccggcaacaattaatagactggatggaggcggataaagttgcaggaccacttctgcgctcggcccttccggctggctggtttattgctgataaatctggagccggtgagcgtgggtctcgcggtatcattgcagcactggggccagatggtaagccctcccgtatcgtagttatctacacgacggggagtcaggcaactatggatgaacgaaatagacagatcgctgagataggtgcctcactgattaagcattggtaactgtcagaccaagtttactcatatatactttagattgatttaaaacttcatttttaatttaaaaggatctaggtgaagatcctttttgataatctcatgaccaaaatcccttaacgtgagttttcgttccactgagcgtcagaccccgtagaaaagatcaaaggatcttcttgagatcctttttttctgcgcgtaatctgctgcttgcaaacaaaaaaaccaccgctaccagcggtggtttgtttgccggatcaagagctaccaactctttttccgaaggtaactggcttcagcagagcgcagataccaaatactgttcttctagtgtagccgtagttaggccaccacttcaagaactctgtagcaccgcctacatacctcgctctgctaatcctgttaccagtggctgctgccagtggcgataagtcgtgtcttaccgggttggactcaagacgatagttaccggataaggcgcagcggtcgggctgaacggggggttcgtgcacacagcccagcttggagcgaacgacctacaccgaactgagatacctacagcgtgagctatgagaaagcgccacgcttcccgaagggagaaaggcggacaggtatccggtaagcggcagggtcggaacaggagagcgcacgagggagcttccagggggaaacgcctggtatctttatagtcctgtcgggtttcgccacctctgacttgagcgtcgatttttgtgatgctcgtcaggggggcggagcctatggaaaaacgccagcaacgcggcctttttacggttcctggccttttgctggccttttgctcacatgttctttcctgcgttatcccctgattctgtggataaccgtattaccgcctttgagtgagctgataccgctcgccgcagccgaacgttgtttaattctgtgagcgtatggcaaacgagcgcccaatacgcaaaccgcctctccccgcgcgttggccgattcattaatgcagctggcacgacaggtttcccgactggaaagcgggcagtgagcgcaacgcaattaatgtgagttagctcactcattaggcaccccaggctttacactttatgcttccggctcgtatgttgtgtggaattgtgagcggataacaatttcacacaggaaacagctatgaccatgattacgccaagctttgttacagatggaagggtcaaacttaataaaggatatttgttcgactttgtgattagtttgatgcgattcaaaaaagaatcctctctagctaccaccgcaatagatcctgttagatacatagatcctcgtcgtgatatcgcattttctaacgtgatggatatattaaagtcgaataaagtgaacaataattaattctttattgtcatcatgaacggcggacatattcagttgataatcggccccatgttttcaggtaaaagtacagaattaattagacgagttagacgttatcaaatagctcaatataaatgcgtgactataaaatattctaacgataatagatacggaacgggactatggacgcatgataagaataattttgaagcattggaagcaactaaactatgtgatgtcttggaatcaattacagatttctccgtgataggtatcgatgaaggacagttctttccagacattgtttaattctgtgagcgtatggcaaacggtaccgagctcaaaaattgaaaaactagcgtctttttttgctcgagtcgacccaccatggagacccctgcctggccccgggtcccgcgccccgagaccgccgtcgctcggacgctcctgctcggctgggtcttcgcccaggtggccggcgcttcaggcactacaaatactgtggcagcatataatttaacttggaaatcaactaatttcaagacaattttggagtgggaacccaaacccgtcaatcaagtctacactgttcaaataagcactaagtcaggagattggaaaagcaaatgcttttacacaacagacacagagtgtgacctcaccgacgagattgtgaaggatgtgaagcagacgtacttggcacgggtcttctcctacccggcagggaatgtggagagcaccggttctgctggggagcctctgtatgagaactccccagagttcacaccttacctggagacaaacctcggacagccaacaattcagagttttgaacaggtgggaacaaaagtgaatgtgaccgtagaagatgaacggactttagtcagaaggaacaacactttcctaagcctccgggatgtttttggcaaggacttaatttatacactttattattggaaatcttcaagttcaggaaagaaaacagccaaaacaaacactaatgagtttttgattgatgtggataaaggagaaaactactgtttcagtgttcaagcagtgattccctcccgaacagttaaccggaagagtacagacagcccggtagagtgtatgggccaggagaaaggggaattcagaggaagaggtgattctccataatattaat

SEQ ID NO: 96 - DNA, 6357 bp, Artificial Sequence
  pCR-TK-SEL-tTF-RGD vector
taatttttatcgatctaattcaacaatgtctggagagctcggatccttctgtgagcgtatggcaaacgaaggaaaaatagttatagtagccgcactcgatgggacatttcaacgtaaaccgtttaataatattttgaatcttattccattatctgaaatggtggtaaaactaactgctgtgtgtatgaaatgctttaaggaggcttccttttctaaacgattgggtgaggaaaccgagatagagataataggaggtaatgatatgtatcaatcggtgtgtagaaagtgttacgtcggctcataatattatattttttatctaaaaaactaaaaataaacattgattaaattttaatataatacttaaaaatggatgttgtgtcgttagataaaccgtttatgtattttgaggaaattgataatgagttagattacgaaccagaaagtgcaaatgaggtcgcaaaaaaactgccgtatcaaggacagttaaaactattactaggagaattattttttcttagtaagttacagcgacacggtatattagatggtgccaccgtagtgtactagttaacggccgccagtgtgctggaattctagaaaagtagaaaatatattctaatttattgcacgggatgagcgaaaaatacatcgtcacctgggacatgttgcagatccatgcacgtaaactcgcaagccgactgatgccttctgaacaatggaaaggcattattgccgtaagccgtggcggtctggtaccgggtgcgttactggcgcgtgaactgggtattcgtcatgtcgataccgtttgtatttccagctacgatcacgacaaccagcgcgagcttaaagtgctgaaacgcgcagaaggcgatggcgaaggcttcatcgttattgatgacctggtggataccggtggtactgcggttgcgattcgtgaaatgtatccaaaagcgcactttgtcaccatcttcgcaaaaccggctggtcgtccgctggttgatgactatgttgttgatatcccgcaagatacctggattgaacagccgtgggatatgggcgtcgtattcgtcccgccaatctccggtcgctaaggatcagcttggcgtaatcaagccgaattctgcagatatccatcacactggcggccgctcgagcatgcatctagagggcccaattcgccctatagtgagtcgtattacaattcactggccgtcgttttacaacgtcgtgactgggaaaaccctggcgttacccaacttaatcgccttgcagcacatccccctttcgccagctggcgtaatagcgaagaggcccgcaccgatcgcccttcccaacagttgcgcagcctgaatggcgaatggacgcgccctgtagcggcgcattaagcgcggcgggtgtggtggttacgcgcagcgtgaccgctacacttgccagcgccctagcgcccgctcctttcgctttcttcccttcctttctcgccacgttcgccggctttccccgtcaagctctaaatcgggggctccctttagggttccgatttagtgctttacggcacctcgaccccaaaaaacttgattagggtgatggttcacgtagtgggccatcgccctgatagacggtttttcgccctttgacgttggagtccacgttctttaatagtggactcttgttccaaactggaacaacactcaaccctatctcggtctattcttttgatttataagggattttgccgatttcggcctattggttaaaaaatgagctgatttaacaaaaatttaacgcgaattttaacaaaattcagggcgcaagggctgctaaaggaagcggaacacgtagaaagccagtccgcagaaacggtgctgaccccggatgaatgtcagctactgggctatctggacaagggaaaacgcaagcgcaaagagaaagcaggtagcttgcagtgggcttacatggcgatagctagactgggcggttttatggacagcaagcgaaccggaattgccagctggggcgccctctggtaaggttgggaagccctgcaaagtaaactggatggctttcttgccgccaaggatctgatggcgcaggggatcaagatctgatcaagagacaggatgaggatcgtttcgcatgattgaacaagatggattgcacgcaggttctccggccgcttgggtggagaggctattcggctatgactgggcacaacagacaatcggctgctctgatgccgccgtgttccggctgtcagcgcaggggcgcccggttctttttgtcaagaccgacctgtccggtgccctgaatgaactgcaggacgaggcagcgcggctatcgtggctggccacgacgggcgttccttgcgcagctgtgctcgacgttgtcactgaagcgggaagggactggctgctattgggcgaagtgccggggcaggatctcctgtcatcccaccttgctcctgccgagaaagtatccatcatggctgatgcaatgcggcggctgcatacgcttgatccggctacctgcccattcgaccaccaagcgaaacatcgcatcgagcgagcacgtactcggatggaagccggtcttgtcgatcaggatgatctggacgaagagcatcaggggctcgcgccagccgaactgttcgccaggctcaaggcgcgcatgcccgacggcgaggatctcgtcgtgacccatggcgatgcctgcttgccgaatatcatggtggaaaatggccgcttttctggattcatcgactgtggccggctgggtgtggcggaccgctatcaggacatagcgttggctacccgtgatattgctgaagagcttggcggcgaatgggctgaccgcttcctcgtgctttacggtatcgccgctcccgattcgcagcgcatcgccttctatcgccttcttgacgagttcttctgaattgaaaaaggaagagtatgagtattcaacatttccgtgtcgcccttattcccttttttgcggcattttgccttcctgtttttgctcacccagaaacgctggtgaaagtaaaagatgctgaagatcagttgggtgcacgagtgggttacatcgaactggatctcaacagcggtaagatccttgagagttttcgccccgaagaacgttttccaatgatgagcacttttaaagttctgctatgtggcgcggtattatcccgtattgacgccgggcaagagcaactcggtcgccgcatacactattctcagaatgacttggttgagtactcaccagtcacagaaaagcatcttacggatggcatgacagtaagagaattatgcagtgctgccataaccatgagtgataacactgcggccaacttacttctgacaacgatcggaggaccgaaggagctaaccgcttttttgcacaacatgggggatcatgtaactcgccttgatcgttgggaaccggagctgaatgaagccataccaaacgacgagcgtgacaccacgatgcctgtagcaatggcaacaacgttgcgcaaactattaactggcgaactacttactctagcttcccggcaacaattaatagactggatggaggcggataaagttgcaggaccacttctgcgctcggcccttccggctggctggtttattgctgataaatctggagccggtgagcgtgggtctcgcggtatcattgcagcactggggccagatggtaagccctcccgtatcgtagttatctacacgacggggagtcaggcaactatggatgaacgaaatagacagatcgctgagataggtgcctcactgattaagcattggtaactgtcagaccaagtttactcatatatactttagattgatttaaaacttcatttttaatttaaaaggatctaggtgaagatcctttttgataatctcatgaccaaaatcccttaacgtgagttttcgttccactgagcgtcagaccccgtagaaaagatcaaaggatcttcttgagatcctttttttctgcgcgtaatctgctgcttgcaaacaaaaaaaccaccgctaccagcggtggtttgtttgccggatcaagagctaccaactctttttccgaaggtaactggcttcagcagagcgcagataccaaatactgttcttctagtgtagccgtagttaggccaccacttcaagaactctgtagcaccgcctacatacctcgctctgctaatcctgttaccagtggctgctgccagtggcgataagtcgtgtcttaccgggttggactcaagacgatagttaccggataaggcgcagcggtcgggctgaacggggggttcgtgcacacagcccagcttggagcgaacgacctacaccgaactgagatacctacagcgtgagctatgagaaagcgccacgcttcccgaagggagaaaggcggacaggtatccggtaagcggcagggtcggaacaggagagcgcacgagggagcttccagggggaaacgcctggtatctttatagtcctgtcgggtttcgccacctctgacttgagcgtcgatttttgtgatgctcgtcaggggggcggagcctatggaaaaacgccagcaacgcggcctttttacggttcctggccttttgctggccttttgctcacatgttctttcctgcgttatcccctgattctgtggataaccgtattaccgcctttgagtgagctgataccgctcgccgcagccgaacgttgtttaattctgtgagcgtatggcaaacgagcgcccaatacgcaaaccgcctctccccgcgcgttggccgattcattaatgcagctggcacgacaggtttcccgactggaaagcgggcagtgagcgcaacgcaattaatgtgagttagctcactcattaggcaccccaggctttacactttatgcttccggctcgtatgttgtgtggaattgtgagcggataacaatttcacacaggaaacagctatgaccatgattacgccaagctttgttacagatggaagggtcaaacttaataaaggatatttgttcgactttgtgattagtttgatgcgattcaaaaaagaatcctctctagctaccaccgcaatagatcctgttagatacatagatcctcgtcgtgatatcgcattttctaacgtgatggatatattaaagtcgaataaagtgaacaataattaattctttattgtcatcatgaacggcggacatattcagttgataatcggccccatgttttcaggtaaaagtacagaattaattagacgagttagacgttatcaaatagctcaatataaatgcgtgactataaaatattctaacgataatagatacggaacgggactatggacgcatgataagaataattttgaagcattggaagcaactaaactatgtgatgtcttggaatcaattacagatttctccgtgataggtatcgatgaaggacagttctttccagacattgtttaattctgtgagcgtatggcaaacggtaccgagctcggtttggaattagtgaaagcttaaaaattgaaattttattttttttttttggaatataaataagctcgaagtcgacccaccatggagacccctgcctggccccgggtcccgcgccccgagaccgccgtcgctcggacgctcctgctcggctgggtcttcgcccaggtggccggcgcttcaggcactacaaatactgtggcagcatataatttaacttggaaatcaactaatttcaagacaattttggagtgggaacccaaacccgtcaatcaagtctacactgttcaaataagcactaagtcaggagattggaaaagcaaatgcttttacacaacagacacagagtgtgacctcaccgacgagattgtgaaggatgtgaagcagacgtacttggcacgggtcttctcctacccggcagggaatgtggagagcaccggttctgctggggagcctctgtatgagaactccccagagttcacaccttacctggagacaaacctcggacagccaacaattcagagttttgaacaggtgggaacaaaagtgaatgtgaccgtagaagatgaacggactttagtcagaaggaacaacactttcctaagcctccgggatgtttttggcaaggacttaatttatacactttattattggaaatcttcaagttcaggaaagaaaacagccaaaacaaacactaatgagtttttgattgatgtggataaaggagaaaactactgtttcagtgttcaagcagtgattccctcccgaacagttaaccggaagagtacagacagcccggtagagtgtatgggccaggagaaaggggaattcagaggaagaggtgattctccataatattaat

SEQ ID NO: 97 - DNA, 6320 bp, Artificial Sequence
  pCR-TK-SL-tTF-RGD vector
taatttttatcgatctaattcaacaatgtctggagagctcggatccttctgtgagcgtatggcaaacgaaggaaaaatagttatagtagccgcactcgatgggacatttcaacgtaaaccgtttaataatattttgaatcttattccattatctgaaatggtggtaaaactaactgctgtgtgtatgaaatgctttaaggaggcttccttttctaaacgattgggtgaggaaaccgagatagagataataggaggtaatgatatgtatcaatcggtgtgtagaaagtgttacgtcggctcataatattatattttttatctaaaaaactaaaaataaacattgattaaattttaatataatacttaaaaatggatgttgtgtcgttagataaaccgtttatgtattttgaggaaattgataatgagttagattacgaaccagaaagtgcaaatgaggtcgcaaaaaaactgccgtatcaaggacagttaaaactattactaggagaattattttttcttagtaagttacagcgacacggtatattagatggtgccaccgtagtgtactagttaacggccgccagtgtgctggaattctagaaaagtagaaaatatattctaatttattgcacgggatgagcgaaaaatacatcgtcacctgggacatgttgcagatccatgcacgtaaactcgcaagccgactgatgccttctgaacaatggaaaggcattattgccgtaagccgtggcggtctggtaccgggtgcgttactggcgcgtgaactgggtattcgtcatgtcgataccgtttgtatttccagctacgatcacgacaaccagcgcgagcttaaagtgctgaaacgcgcagaaggcgatggcgaaggcttcatcgttattgatgacctggtggataccggtggtactgcggttgcgattcgtgaaatgtatccaaaagcgcactttgtcaccatcttcgcaaaaccggctggtcgtccgctggttgatgactatgttgttgatatcccgcaagatacctggattgaacagccgtgggatatgggcgtcgtattcgtcccgccaatctccggtcgctaaggatcagcttggcgtaatcaagccgaattctgcagatatccatcacactggcggccgctcgagcatgcatctagagggcccaattcgccctatagtgagtcgtattacaattcactggccgtcgttttacaacgtcgtgactgggaaaaccctggcgttacccaacttaatcgccttgcagcacatccccctttcgccagctggcgtaatagcgaagaggcccgcaccgatcgcccttcccaacagttgcgcagcctgaatggcgaatggacgcgccctgtagcggcgcattaagcgcggcgggtgtggtggttacgcgcagcgtgaccgctacacttgccagcgccctagcgcccgctcctttcgctttcttcccttcctttctcgccacgttcgccggctttccccgtcaagctctaaatcgggggctccctttagggttccgatttagtgctttacggcacctcgaccccaaaaaacttgattagggtgatggttcacgtagtgggccatcgccctgatagacggtttttcgccctttgacgttggagtccacgttctttaatagtggactcttgttccaaactggaacaacactcaaccctatctcggtctattcttttgatttataagggattttgccgatttcggcctattggttaaaaaatgagctgatttaacaaaaatttaacgcgaattttaacaaaattcagggcgcaagggctgctaaaggaagcggaacacgtagaaagccagtccgcagaaacggtgctgaccccggatgaatgtcagctactgggctatctggacaagggaaaacgcaagcgcaaagagaaagcaggtagcttgcagtgggcttacatggcgatagctagactgggcggttttatggacagcaagcgaaccggaattgccagctggggcgccctctggtaaggttgggaagccctgcaaagtaaactggatggctttcttgccgccaaggatctgatggcgcaggggatcaagatctgatcaagagacaggatgaggatcgtttcgcatgattgaacaagatggattgcacgcaggttctccggccgcttgggtggagaggctattcggctatgactgggcacaacagacaatcggctgctctgatgccgccgtgttccggctgtcagcgcaggggcgcccggttctttttgtcaagaccgacctgtccggtgccctgaatgaactgcaggacgaggcagcgcggctatcgtggctggccacgacgggcgttccttgcgcagctgtgctcgacgttgtcactgaagcgggaagggactggctgctattgggcgaagtgccggggcaggatctcctgtcatcccaccttgctcctgccgagaaagtatccatcatggctgatgcaatgcggcggctgcatacgcttgatccggctacctgcccattcgaccaccaagcgaaacatcgcatcgagcgagcacgtactcggatggaagccggtcttgtcgatcaggatgatctggacgaagagcatcaggggctcgcgccagccgaactgttcgccaggctcaaggcgcgcatgcccgacggcgaggatctcgtcgtgacccatggcgatgcctgcttgccgaatatcatggtggaaaatggccgcttttctggattcatcgactgtggccggctgggtgtggcggaccgctatcaggacatagcgttggctacccgtgatattgctgaagagcttggcggcgaatgggctgaccgcttcctcgtgctttacggtatcgccgctcccgattcgcagcgcatcgccttctatcgccttcttgacgagttcttctgaattgaaaaaggaagagtatgagtattcaacatttccgtgtcgcccttattcccttttttgcggcattttgccttcctgtttttgctcacccagaaacgctggtgaaagtaaaagatgctgaagatcagttgggtgcacgagtgggttacatcgaactggatctcaacagcggtaagatccttgagagttttcgccccgaagaacgttttccaatgatgagcacttttaaagttctgctatgtggcgcggtattatcccgtattgacgccgggcaagagcaactcggtcgccgcatacactattctcagaatgacttggttgagtactcaccagtcacagaaaagcatcttacggatggcatgacagtaagagaattatgcagtgctgccataaccatgagtgataacactgcggccaacttacttctgacaacgatcggaggaccgaaggagctaaccgcttttttgcacaacatgggggatcatgtaactcgccttgatcgttgggaaccggagctgaatgaagccataccaaacgacgagcgtgacaccacgatgcctgtagcaatggcaacaacgttgcgcaaactattaactggcgaactacttactctagcttcccggcaacaattaatagactggatggaggcggataaagttgcaggaccacttctgcgctcggcccttccggctggctggtttattgctgataaatctggagccggtgagcgtgggtctcgcggtatcattgcagcactggggccagatggtaagccctcccgtatcgtagttatctacacgacggggagtcaggcaactatggatgaacgaaatagacagatcgctgagataggtgcctcactgattaagcattggtaactgtcagaccaagtttactcatatatactttagattgatttaaaacttcatttttaatttaaaaggatctaggtgaagatcctttttgataatctcatgaccaaaatcccttaacgtgagttttcgttccactgagcgtcagaccccgtagaaaagatcaaaggatcttcttgagatcctttttttctgcgcgtaatctgctgcttgcaaacaaaaaaaccaccgctaccagcggtggtttgtttgccggatcaagagctaccaactctttttccgaaggtaactggcttcagcagagcgcagataccaaatactgttcttctagtgtagccgtagttaggccaccacttcaagaactctgtagcaccgcctacatacctcgctctgctaatcctgttaccagtggctgctgccagtggcgataagtcgtgtcttaccgggttggactcaagacgatagttaccggataaggcgcagcggtcgggctgaacggggggttcgtgcacacagcccagcttggagcgaacgacctacaccgaactgagatacctacagcgtgagctatgagaaagcgccacgcttcccgaagggagaaaggcggacaggtatccggtaagcggcagggtcggaacaggagagcgcacgagggagcttccagggggaaacgcctggtatctttatagtcctgtcgggtttcgccacctctgacttgagcgtcgatttttgtgatgctcgtcaggggggcggagcctatggaaaaacgccagcaacgcggcctttttacggttcctggccttttgctggccttttgctcacatgttctttcctgcgttatcccctgattctgtggataaccgtattaccgcctttgagtgagctgataccgctcgccgcagccgaacgttgtttaattctgtgagcgtatggcaaacgagcgcccaatacgcaaaccgcctctccccgcgcgttggccgattcattaatgcagctggcacgacaggtttcccgactggaaagcgggcagtgagcgcaacgcaattaatgtgagttagctcactcattaggcaccccaggctttacactttatgcttccggctcgtatgttgtgtggaattgtgagcggataacaatttcacacaggaaacagctatgaccatgattacgccaagctttgttacagatggaagggtcaaacttaataaaggatatttgttcgactttgtgattagtttgatgcgattcaaaaaagaatcctctctagctaccaccgcaatagatcctgttagatacatagatcctcgtcgtgatatcgcattttctaacgtgatggatatattaaagtcgaataaagtgaacaataattaattctttattgtcatcatgaacggcggacatattcagttgataatcggccccatgttttcaggtaaaagtacagaattaattagacgagttagacgttatcaaatagctcaatataaatgcgtgactataaaatattctaacgataatagatacggaacgggactatggacgcatgataagaataattttgaagcattggaagcaactaaactatgtgatgtcttggaatcaattacagatttctccgtgataggtatcgatgaaggacagttctttccagacattgtttaattctgtgagcgtatggcaaacggtaccgagctcttttttttttttttttttttggcatataaataagtcgacccaccatggagacccctgcctggccccgggtcccgcgccccgagaccgccgtcgctcggacgctcctgctcggctgggtcttcgcccaggtggccggcgcttcaggcactacaaatactgtggcagcatataatttaacttggaaatcaactaatttcaagacaattttggagtgggaacccaaacccgtcaatcaagtctacactgttcaaataagcactaagtcaggagattggaaaagcaaatgcttttacacaacagacacagagtgtgacctcaccgacgagattgtgaaggatgtgaagcagacgtacttggcacgggtcttctcctacccggcagggaatgtggagagcaccggttctgctggggagcctctgtatgagaactccccagagttcacaccttacctggagacaaacctcggacagccaacaattcagagttttgaacaggtgggaacaaaagtgaatgtgaccgtagaagatgaacggactttagtcagaaggaacaacactttcctaagcctccgggatgtttttggcaaggacttaatttatacactttattattggaaatcttcaagttcaggaaagaaaacagccaaaacaaacactaatgagtttttgattgatgtggataaaggagaaaactactgtttcagtgttcaagcagtgattccctcccgaacagttaaccggaagagtacagacagcccggtagagtgtatgggccaggagaaaggggaattcagaggaagaggtgattctccataatattaat

SEQ ID NO: 98 - DNA, 3717 bp, Artificial Sequence
  pGA4-G6 vector
ctaaattgtaagcgttaatattttgttaaaattcgcgttaaatttttgttaaatcagctcattttttaaccaataggccgaaatcggcaaaatcccttataaatcaaaagaatagaccgagatagggttgagtgttgttccagtttggaacaagagtccactattaaagaacgtggactccaacgtcaaagggcgaaaaaccgtctatcagggctatggcccactacgtgaaccatcaccctaatcaagttttttggggtcgaggtgccgtaaagcactaaatcggaaccctaaagggagcccccgatttagagcttgacggggaaagccggcgaacgtggcgagaaaggaagggaagaaagcgaaaggagcgggcgctagggcgctggcaagtgtagcggtcacgctgcgcgtaaccaccacacccgccgcgcttaatgcgccgctacagggcgcgtcccattcgccattcaggctgcgcaactgttgggaagggcgatcggtgcgggcctcttcgctattacgccagctggcgaaagggggatgtgctgcaaggcgattaagttgggtaacgccagggttttcccagtcacgacgttgtaaaacgacggccagtgagcgcgcgtaatacgactcactatagggcgaattgggtaccgggccccccctcgagtcgacccaccatggagacagacacactcctgctatgggtactgctgctctgggttccaggttccactggtgacgaggtccaactggtggagtcagggggagggctggtccagcctggagggtccctgaggctctcctgtgcagcctctggattcactatcagcgactactggatccactgggttcgccaggccccgggcaagggcctggagtgggtcgcaggaatcaccccagccggtggttacacctactacgccgactcagtcaagggacgattcaccatctccgccgacacctccaagaacaccgcctacctgcaaatgaacagcctgagggccgaggacacggccgtgtattactgtgcaaggttcgtgttcttcctgccatatgccatggactactggggccaagggaccctggtcaccgtctcctcaggtggtggcggttcaggcggaggtggctctggcggtggcggatcggacattcagatgacccagtctccaagctccctgtccgctagcgtcggagacagggtcactatcacttgcagagcttcccaggacgtctccactgcagtggcatggtaccagcagaagccagggaaggcaccaaagctccttatttactcagcaagcttcctttactccggagtcccatcccgattcagcggcagcggcagtggcacagattttaccctcacaatttcaagcctccaaccagaggatttcgcaacctactactgtcaacaaggctacggcaacccattcaccttcgggcaagggaccaaggttgagattaagcgagactacaaggatgacgacgacaagtaattaattaagagctccagcttttgttccctttagtgagggttaattgcgcgcttggcgtaatcatggtcatagctgtttcctgtgtgaaattgttatccgctcacaattccacacaacatacgagccggaagcataaagtgtaaagcctggggtgcctaatgagtgagctaactcacattaattgcgttgcgctcactgcccgctttccagtcgggaaacctgtcgtgccagctgcattaatgaatcggccaacgcgcggggagaggcggtttgcgtattgggcgctcttccgcttcctcgctcactgactcgctgcgctcggtcgttcggctgcggcgagcggtatcagctcactcaaaggcggtaatacggttatccacagaatcaggggataacgcaggaaagaacatgtgagcaaaaggccagcaaaaggccaggaaccgtaaaaaggccgcgttgctggcgtttttccataggctccgcccccctgacgagcatcacaaaaatcgacgctcaagtcagaggtggcgaaacccgacaggactataaagataccaggcgtttccccctggaagctccctcgtgcgctctcctgttccgaccctgccgcttaccggatacctgtccgcctttctcccttcgggaagcgtggcgctttctcatagctcacgctgtaggtatctcagttcggtgtaggtcgttcgctccaagctgggctgtgtgcacgaaccccccgttcagcccgaccgctgcgccttatccggtaactatcgtcttgagtccaacccggtaagacacgacttatcgccactggcagcagccactggtaacaggattagcagagcgaggtatgtaggcggtgctacagagttcttgaagtggtggcctaactacggctacactagaagaacagtatttggtatctgcgctctgctgaagccagttaccttcggaaaaagagttggtagctcttgatccggcaaacaaaccaccgctggtagcggtggtttttttgtttgcaagcagcagattacgcgcagaaaaaaaggatctcaagaagatcctttgatcttttctacggggtctgacgctcagtggaacgaaaactcacgttaagggattttggtcatgagattatcaaaaaggatcttcacctagatccttttaaattaaaaatgaagttttaaatcaatctaaagtatatatgagtaaacttggtctgacagttaccaatgcttaatcagtgaggcacctatctcagcgatctgtctatttcgttcatccatagttgcctgactccccgtcgtgtagataactacgatacgggagggcttaccatctggccccagtgctgcaatgataccgcgagaaccacgctcaccggctccagatttatcagcaataaaccagccagccggaagggccgagcgcagaagtggtcctgcaactttatccgcctccatccagtctattaattgttgccgggaagctagagtaagtagttcgccagttaatagtttgcgcaacgttgttgccattgctacaggcatcgtggtgtcacgctcgtcgtttggtatggcttcattcagctccggttcccaacgatcaaggcgagttacatgatcccccatgttgtgcaaaaaagcggttagctccttcggtcctccgatcgttgtcagaagtaagttggccgcagtgttatcactcatggttatggcagcactgcataattctcttactgtcatgccatccgtaagatgcttttctgtgactggtgagtactcaaccaagtcattctgagaatagtgtatgcggcgaccgagttgctcttgcccggcgtcaatacgggataataccgcgccacatagcagaactttaaaagtgctcatcattggaaaacgttcttcggggcgaaaactctcaaggatcttaccgctgttgagatccagttcgatgtaacccactcgtgcacccaactgatcttcagcatcttttactttcaccagcgtttctgggtgagcaaaaacaggaaggcaaaatgccgcaaaaaagggaataagggcgacacggaaatgttgaatactcatactcttcctttttcaatattattgaagcatttatcagggttattgtctcatgagcggatacatatttgaatgtatttagaaaaataaacaaataggggttccgcgcacatttccccgaaaagtgccac

SEQ ID NO: 99 - protein, 272 aa, Artificial Sequence
  G6-FLAG protein sequence
METDTLLLWVLLLWVPGSTGDEVQLVESGGGLVQPGGSLRLSCAASGFTISDYWIHWVRQAPGKGLEWVAGITPAGGYTYYADSVKGRFTISADTSKNTAYLQMNSLRAEDTAVYYCARFVFFLPYAMDYWGQGTLVTVSSGGGGSGGGGSGGGGSDIQMTQSPSSLSASVGDRVTITCRASQDVSTAVAWYQQKPGKAPKLLIYSASFLYSGVPSRFSGSGSGTDFTLTISSLQPEDFATYYCQQGYGNPFTFGQGTKVEIKRDYKDDDDK

SEQ ID NO: 100 - DNA, 6367 bp, Artificial Sequence
  pCR-TK-SE-G6-FLAG vector
taatttttatcgatctaattcaacaatgtctggagagctcggatccttctgtgagcgtatggcaaacgaaggaaaaatagttatagtagccgcactcgatgggacatttcaacgtaaaccgtttaataatattttgaatcttattccattatctgaaatggtggtaaaactaactgctgtgtgtatgaaatgctttaaggaggcttccttttctaaacgattgggtgaggaaaccgagatagagataataggaggtaatgatatgtatcaatcggtgtgtagaaagtgttacgtcggctcataatattatattttttatctaaaaaactaaaaataaacattgattaaattttaatataatacttaaaaatggatgttgtgtcgttagataaaccgtttatgtattttgaggaaattgataatgagttagattacgaaccagaaagtgcaaatgaggtcgcaaaaaaactgccgtatcaaggacagttaaaactattactaggagaattattttttcttagtaagttacagcgacacggtatattagatggtgccaccgtagtgtactagttaacggccgccagtgtgctggaattctagaaaagtagaaaatatattctaatttattgcacgggatgagcgaaaaatacatcgtcacctgggacatgttgcagatccatgcacgtaaactcgcaagccgactgatgccttctgaacaatggaaaggcattattgccgtaagccgtggcggtctggtaccgggtgcgttactggcgcgtgaactgggtattcgtcatgtcgataccgtttgtatttccagctacgatcacgacaaccagcgcgagcttaaagtgctgaaacgcgcagaaggcgatggcgaaggcttcatcgttattgatgacctggtggataccggtggtactgcggttgcgattcgtgaaatgtatccaaaagcgcactttgtcaccatcttcgcaaaaccggctggtcgtccgctggttgatgactatgttgttgatatcccgcaagatacctggattgaacagccgtgggatatgggcgtcgtattcgtcccgccaatctccggtcgctaaggatcagcttggcgtaatcaagccgaattctgcagatatccatcacactggcggccgctcgagcatgcatctagagggcccaattcgccctatagtgagtcgtattacaattcactggccgtcgttttacaacgtcgtgactgggaaaaccctggcgttacccaacttaatcgccttgcagcacatccccctttcgccagctggcgtaatagcgaagaggcccgcaccgatcgcccttcccaacagttgcgcagcctgaatggcgaatggacgcgccctgtagcggcgcattaagcgcggcgggtgtggtggttacgcgcagcgtgaccgctacacttgccagcgccctagcgcccgctcctttcgctttcttcccttcctttctcgccacgttcgccggctttccccgtcaagctctaaatcgggggctccctttagggttccgatttagtgctttacggcacctcgaccccaaaaaacttgattagggtgatggttcacgtagtgggccatcgccctgatagacggtttttcgccctttgacgttggagtccacgttctttaatagtggactcttgttccaaactggaacaacactcaaccctatctcggtctattcttttgatttataagggattttgccgatttcggcctattggttaaaaaatgagctgatttaacaaaaatttaacgcgaattttaacaaaattcagggcgcaagggctgctaaaggaagcggaacacgtagaaagccagtccgcagaaacggtgctgaccccggatgaatgtcagctactgggctatctggacaagggaaaacgcaagcgcaaagagaaagcaggtagcttgcagtgggcttacatggcgatagctagactgggcggttttatggacagcaagcgaaccggaattgccagctggggcgccctctggtaaggttgggaagccctgcaaagtaaactggatggctttcttgccgccaaggatctgatggcgcaggggatcaagatctgatcaagagacaggatgaggatcgtttcgcatgattgaacaagatggattgcacgcaggttctccggccgcttgggtggagaggctattcggctatgactgggcacaacagacaatcggctgctctgatgccgccgtgttccggctgtcagcgcaggggcgcccggttctttttgtcaagaccgacctgtccggtgccctgaatgaactgcaggacgaggcagcgcggctatcgtggctggccacgacgggcgttccttgcgcagctgtgctcgacgttgtcactgaagcgggaagggactggctgctattgggcgaagtgccggggcaggatctcctgtcatcccaccttgctcctgccgagaaagtatccatcatggctgatgcaatgcggcggctgcatacgcttgatccggctacctgcccattcgaccaccaagcgaaacatcgcatcgagcgagcacgtactcggatggaagccggtcttgtcgatcaggatgatctggacgaagagcatcaggggctcgcgccagccgaactgttcgccaggctcaaggcgcgcatgcccgacggcgaggatctcgtcgtgacccatggcgatgcctgcttgccgaatatcatggtggaaaatggccgcttttctggattcatcgactgtggccggctgggtgtggcggaccgctatcaggacatagcgttggctacccgtgatattgctgaagagcttggcggcgaatgggctgaccgcttcctcgtgctttacggtatcgccgctcccgattcgcagcgcatcgccttctatcgccttcttgacgagttcttctgaattgaaaaaggaagagtatgagtattcaacatttccgtgtcgcccttattcccttttttgcggcattttgccttcctgtttttgctcacccagaaacgctggtgaaagtaaaagatgctgaagatcagttgggtgcacgagtgggttacatcgaactggatctcaacagcggtaagatccttgagagttttcgccccgaagaacgttttccaatgatgagcacttttaaagttctgctatgtggcgcggtattatcccgtattgacgccgggcaagagcaactcggtcgccgcatacactattctcagaatgacttggttgagtactcaccagtcacagaaaagcatcttacggatggcatgacagtaagagaattatgcagtgctgccataaccatgagtgataacactgcggccaacttacttctgacaacgatcggaggaccgaaggagctaaccgcttttttgcacaacatgggggatcatgtaactcgccttgatcgttgggaaccggagctgaatgaagccataccaaacgacgagcgtgacaccacgatgcctgtagcaatggcaacaacgttgcgcaaactattaactggcgaactacttactctagcttcccggcaacaattaatagactggatggaggcggataaagttgcaggaccacttctgcgctcggcccttccggctggctggtttattgctgataaatctggagccggtgagcgtgggtctcgcggtatcattgcagcactggggccagatggtaagccctcccgtatcgtagttatctacacgacggggagtcaggcaactatggatgaacgaaatagacagatcgctgagataggtgcctcactgattaagcattggtaactgtcagaccaagtttactcatatatactttagattgatttaaaacttcatttttaatttaaaaggatctaggtgaagatcctttttgataatctcatgaccaaaatcccttaacgtgagttttcgttccactgagcgtcagaccccgtagaaaagatcaaaggatcttcttgagatcctttttttctgcgcgtaatctgctgcttgcaaacaaaaaaaccaccgctaccagcggtggtttgtttgccggatcaagagctaccaactctttttccgaaggtaactggcttcagcagagcgcagataccaaatactgttcttctagtgtagccgtagttaggccaccacttcaagaactctgtagcaccgcctacatacctcgctctgctaatcctgttaccagtggctgctgccagtggcgataagtcgtgtcttaccgggttggactcaagacgatagttaccggataaggcgcagcggtcgggctgaacggggggttcgtgcacacagcccagcttggagcgaacgacctacaccgaactgagatacctacagcgtgagctatgagaaagcgccacgcttcccgaagggagaaaggcggacaggtatccggtaagcggcagggtcggaacaggagagcgcacgagggagcttccagggggaaacgcctggtatctttatagtcctgtcgggtttcgccacctctgacttgagcgtcgatttttgtgatgctcgtcaggggggcggagcctatggaaaaacgccagcaacgcggcctttttacggttcctggccttttgctggccttttgctcacatgttctttcctgcgttatcccctgattctgtggataaccgtattaccgcctttgagtgagctgataccgctcgccgcagccgaacgttgtttaattctgtgagcgtatggcaaacgagcgcccaatacgcaaaccgcctctccccgcgcgttggccgattcattaatgcagctggcacgacaggtttcccgactggaaagcgggcagtgagcgcaacgcaattaatgtgagttagctcactcattaggcaccccaggctttacactttatgcttccggctcgtatgttgtgtggaattgtgagcggataacaatttcacacaggaaacagctatgaccatgattacgccaagctttgttacagatggaagggtcaaacttaataaaggatatttgttcgactttgtgattagtttgatgcgattcaaaaaagaatcctctctagctaccaccgcaatagatcctgttagatacatagatcctcgtcgtgatatcgcattttctaacgtgatggatatattaaagtcgaataaagtgaacaataattaattctttattgtcatcatgaacggcggacatattcagttgataatcggccccatgttttcaggtaaaagtacagaattaattagacgagttagacgttatcaaatagctcaatataaatgcgtgactataaaatattctaacgataatagatacggaacgggactatggacgcatgataagaataattttgaagcattggaagcaactaaactatgtgatgtcttggaatcaattacagatttctccgtgataggtatcgatgaaggacagttctttccagacattgtttaattctgtgagcgtatggcaaacggtaccgagctcaaaaattgaaaaactagcgtctttttttgctcgagtcgacccaccatggagacagacacactcctgctatgggtactgctgctctgggttccaggttccactggtgacgaggtccaactggtggagtcagggggagggctggtccagcctggagggtccctgaggctctcctgtgcagcctctggattcactatcagcgactactggatccactgggttcgccaggccccgggcaagggcctggagtgggtcgcaggaatcaccccagccggtggttacacctactacgccgactcagtcaagggacgattcaccatctccgccgacacctccaagaacaccgcctacctgcaaatgaacagcctgagggccgaggacacggccgtgtattactgtgcaaggttcgtgttcttcctgccatatgccatggactactggggccaagggaccctggtcaccgtctcctcaggtggtggcggttcaggcggaggtggctctggcggtggcggatcggacattcagatgacccagtctccaagctccctgtccgctagcgtcggagacagggtcactatcacttgcagagcttcccaggacgtctccactgcagtggcatggtaccagcagaagccagggaaggcaccaaagctccttatttactcagcaagcttcctttactccggagtcccatcccgattcagcggcagcggcagtggcacagattttaccctcacaatttcaagcctccaaccagaggatttcgcaacctactactgtcaacaaggctacggcaacccattcaccttcgggcaagggaccaaggttgagattaagcgagactacaaggatgacgacgacaagtaattaat

SEQ ID NO: 101 - DNA, 6403 bp, Artificial Sequence
  pCR-TK-SEL-G6-FLAG vector
taatttttatcgatctaattcaacaatgtctggagagctcggatccttctgtgagcgtatggcaaacgaaggaaaaatagttatagtagccgcactcgatgggacatttcaacgtaaaccgtttaataatattttgaatcttattccattatctgaaatggtggtaaaactaactgctgtgtgtatgaaatgctttaaggaggcttccttttctaaacgattgggtgaggaaaccgagatagagataataggaggtaatgatatgtatcaatcggtgtgtagaaagtgttacgtcggctcataatattatattttttatctaaaaaactaaaaataaacattgattaaattttaatataatacttaaaaatggatgttgtgtcgttagataaaccgtttatgtattttgaggaaattgataatgagttagattacgaaccagaaagtgcaaatgaggtcgcaaaaaaactgccgtatcaaggacagttaaaactattactaggagaattattttttcttagtaagttacagcgacacggtatattagatggtgccaccgtagtgtactagttaacggccgccagtgtgctggaattctagaaaagtagaaaatatattctaatttattgcacgggatgagcgaaaaatacatcgtcacctgggacatgttgcagatccatgcacgtaaactcgcaagccgactgatgccttctgaacaatggaaaggcattattgccgtaagccgtggcggtctggtaccgggtgcgttactggcgcgtgaactgggtattcgtcatgtcgataccgtttgtatttccagctacgatcacgacaaccagcgcgagcttaaagtgctgaaacgcgcagaaggcgatggcgaaggcttcatcgttattgatgacctggtggataccggtggtactgcggttgcgattcgtgaaatgtatccaaaagcgcactttgtcaccatcttcgcaaaaccggctggtcgtccgctggttgatgactatgttgttgatatcccgcaagatacctggattgaacagccgtgggatatgggcgtcgtattcgtcccgccaatctccggtcgctaaggatcagcttggcgtaatcaagccgaattctgcagatatccatcacactggcggccgctcgagcatgcatctagagggcccaattcgccctatagtgagtcgtattacaattcactggccgtcgttttacaacgtcgtgactgggaaaaccctggcgttacccaacttaatcgccttgcagcacatccccctttcgccagctggcgtaatagcgaagaggcccgcaccgatcgcccttcccaacagttgcgcagcctgaatggcgaatggacgcgccctgtagcggcgcattaagcgcggcgggtgtggtggttacgcgcagcgtgaccgctacacttgccagcgccctagcgcccgctcctttcgctttcttcccttcctttctcgccacgttcgccggctttccccgtcaagctctaaatcgggggctccctttagggttccgatttagtgctttacggcacctcgaccccaaaaaacttgattagggtgatggttcacgtagtgggccatcgccctgatagacggtttttcgccctttgacgttggagtccacgttctttaatagtggactcttgttccaaactggaacaacactcaaccctatctcggtctattcttttgatttataagggattttgccgatttcggcctattggttaaaaaatgagctgatttaacaaaaatttaacgcgaattttaacaaaattcagggcgcaagggctgctaaaggaagcggaacacgtagaaagccagtccgcagaaacggtgctgaccccggatgaatgtcagctactgggctatctggacaagggaaaacgcaagcgcaaagagaaagcaggtagcttgcagtgggcttacatggcgatagctagactgggcggttttatggacagcaagcgaaccggaattgccagctggggcgccctctggtaaggttgggaagccctgcaaagtaaactggatggctttcttgccgccaaggatctgatggcgcaggggatcaagatctgatcaagagacaggatgaggatcgtttcgcatgattgaacaagatggattgcacgcaggttctccggccgcttgggtggagaggctattcggctatgactgggcacaacagacaatcggctgctctgatgccgccgtgttccggctgtcagcgcaggggcgcccggttctttttgtcaagaccgacctgtccggtgccctgaatgaactgcaggacgaggcagcgcggctatcgtggctggccacgacgggcgttccttgcgcagctgtgctcgacgttgtcactgaagcgggaagggactggctgctattgggcgaagtgccggggcaggatctcctgtcatcccaccttgctcctgccgagaaagtatccatcatggctgatgcaatgcggcggctgcatacgcttgatccggctacctgcccattcgaccaccaagcgaaacatcgcatcgagcgagcacgtactcggatggaagccggtcttgtcgatcaggatgatctggacgaagagcatcaggggctcgcgccagccgaactgttcgccaggctcaaggcgcgcatgcccgacggcgaggatctcgtcgtgacccatggcgatgcctgcttgccgaatatcatggtggaaaatggccgcttttctggattcatcgactgtggccggctgggtgtggcggaccgctatcaggacatagcgttggctacccgtgatattgctgaagagcttggcggcgaatgggctgaccgcttcctcgtgctttacggtatcgccgctcccgattcgcagcgcatcgccttctatcgccttcttgacgagttcttctgaattgaaaaaggaagagtatgagtattcaacatttccgtgtcgcccttattcccttttttgcggcattttgccttcctgtttttgctcacccagaaacgctggtgaaagtaaaagatgctgaagatcagttgggtgcacgagtgggttacatcgaactggatctcaacagcggtaagatccttgagagttttcgccccgaagaacgttttccaatgatgagcacttttaaagttctgctatgtggcgcggtattatcccgtattgacgccgggcaagagcaactcggtcgccgcatacactattctcagaatgacttggttgagtactcaccagtcacagaaaagcatcttacggatggcatgacagtaagagaattatgcagtgctgccataaccatgagtgataacactgcggccaacttacttctgacaacgatcggaggaccgaaggagctaaccgcttttttgcacaacatgggggatcatgtaactcgccttgatcgttgggaaccggagctgaatgaagccataccaaacgacgagcgtgacaccacgatgcctgtagcaatggcaacaacgttgcgcaaactattaactggcgaactacttactctagcttcccggcaacaattaatagactggatggaggcggataaagttgcaggaccacttctgcgctcggcccttccggctggctggtttattgctgataaatctggagccggtgagcgtgggtctcgcggtatcattgcagcactggggccagatggtaagccctcccgtatcgtagttatctacacgacggggagtcaggcaactatggatgaacgaaatagacagatcgctgagataggtgcctcactgattaagcattggtaactgtcagaccaagtttactcatatatactttagattgatttaaaacttcatttttaatttaaaaggatctaggtgaagatcctttttgataatctcatgaccaaaatcccttaacgtgagttttcgttccactgagcgtcagaccccgtagaaaagatcaaaggatcttcttgagatcctttttttctgcgcgtaatctgctgcttgcaaacaaaaaaaccaccgctaccagcggtggtttgtttgccggatcaagagctaccaactctttttccgaaggtaactggcttcagcagagcgcagataccaaatactgttcttctagtgtagccgtagttaggccaccacttcaagaactctgtagcaccgcctacatacctcgctctgctaatcctgttaccagtggctgctgccagtggcgataagtcgtgtcttaccgggttggactcaagacgatagttaccggataaggcgcagcggtcgggctgaacggggggttcgtgcacacagcccagcttggagcgaacgacctacaccgaactgagatacctacagcgtgagctatgagaaagcgccacgcttcccgaagggagaaaggcggacaggtatccggtaagcggcagggtcggaacaggagagcgcacgagggagcttccagggggaaacgcctggtatctttatagtcctgtcgggtttcgccacctctgacttgagcgtcgatttttgtgatgctcgtcaggggggcggagcctatggaaaaacgccagcaacgcggcctttttacggttcctggccttttgctggccttttgctcacatgttctttcctgcgttatcccctgattctgtggataaccgtattaccgcctttgagtgagctgataccgctcgccgcagccgaacgttgtttaattctgtgagcgtatggcaaacgagcgcccaatacgcaaaccgcctctccccgcgcgttggccgattcattaatgcagctggcacgacaggtttcccgactggaaagcgggcagtgagcgcaacgcaattaatgtgagttagctcactcattaggcaccccaggctttacactttatgcttccggctcgtatgttgtgtggaattgtgagcggataacaatttcacacaggaaacagctatgaccatgattacgccaagctttgttacagatggaagggtcaaacttaataaaggatatttgttcgactttgtgattagtttgatgcgattcaaaaaagaatcctctctagctaccaccgcaatagatcctgttagatacatagatcctcgtcgtgatatcgcattttctaacgtgatggatatattaaagtcgaataaagtgaacaataattaattctttattgtcatcatgaacggcggacatattcagttgataatcggccccatgttttcaggtaaaagtacagaattaattagacgagttagacgttatcaaatagctcaatataaatgcgtgactataaaatattctaacgataatagatacggaacgggactatggacgcatgataagaataattttgaagcattggaagcaactaaactatgtgatgtcttggaatcaattacagatttctccgtgataggtatcgatgaaggacagttctttccagacattgtttaattctgtgagcgtatggcaaacggtaccgagctcggtttggaattagtgaaagcttaaaaattgaaattttattttttttttttggaatataaataagctcgaagtcgacccaccatggagacagacacactcctgctatgggtactgctgctctgggttccaggttccactggtgacgaggtccaactggtggagtcagggggagggctggtccagcctggagggtccctgaggctctcctgtgcagcctctggattcactatcagcgactactggatccactgggttcgccaggccccgggcaagggcctggagtgggtcgcaggaatcaccccagccggtggttacacctactacgccgactcagtcaagggacgattcaccatctccgccgacacctccaagaacaccgcctacctgcaaatgaacagcctgagggccgaggacacggccgtgtattactgtgcaaggttcgtgttcttcctgccatatgccatggactactggggccaagggaccctggtcaccgtctcctcaggtggtggcggttcaggcggaggtggctctggcggtggcggatcggacattcagatgacccagtctccaagctccctgtccgctagcgtcggagacagggtcactatcacttgcagagcttcccaggacgtctccactgcagtggcatggtaccagcagaagccagggaaggcaccaaagctccttatttactcagcaagcttcctttactccggagtcccatcccgattcagcggcagcggcagtggcacagattttaccctcacaatttcaagcctccaaccagaggatttcgcaacctactactgtcaacaaggctacggcaacccattcaccttcgggcaagggaccaaggttgagattaagcgagactacaaggatgacgacgacaagtaattaat

SEQ ID NO: 102 - DNA, 6366 bp, Artificial Sequence
  pCR-TK-SL-G6-FLAG vector
taatttttatcgatctaattcaacaatgtctggagagctcggatccttctgtgagcgtatggcaaacgaaggaaaaatagttatagtagccgcactcgatgggacatttcaacgtaaaccgtttaataatattttgaatcttattccattatctgaaatggtggtaaaactaactgctgtgtgtatgaaatgctttaaggaggcttccttttctaaacgattgggtgaggaaaccgagatagagataataggaggtaatgatatgtatcaatcggtgtgtagaaagtgttacgtcggctcataatattatattttttatctaaaaaactaaaaataaacattgattaaattttaatataatacttaaaaatggatgttgtgtcgttagataaaccgtttatgtattttgaggaaattgataatgagttagattacgaaccagaaagtgcaaatgaggtcgcaaaaaaactgccgtatcaaggacagttaaaactattactaggagaattattttttcttagtaagttacagcgacacggtatattagatggtgccaccgtagtgtactagttaacggccgccagtgtgctggaattctagaaaagtagaaaatatattctaatttattgcacgggatgagcgaaaaatacatcgtcacctgggacatgttgcagatccatgcacgtaaactcgcaagccgactgatgccttctgaacaatggaaaggcattattgccgtaagccgtggcggtctggtaccgggtgcgttactggcgcgtgaactgggtattcgtcatgtcgataccgtttgtatttccagctacgatcacgacaaccagcgcgagcttaaagtgctgaaacgcgcagaaggcgatggcgaaggcttcatcgttattgatgacctggtggataccggtggtactgcggttgcgattcgtgaaatgtatccaaaagcgcactttgtcaccatcttcgcaaaaccggctggtcgtccgctggttgatgactatgttgttgatatcccgcaagatacctggattgaacagccgtgggatatgggcgtcgtattcgtcccgccaatctccggtcgctaaggatcagcttggcgtaatcaagccgaattctgcagatatccatcacactggcggccgctcgagcatgcatctagagggcccaattcgccctatagtgagtcgtattacaattcactggccgtcgttttacaacgtcgtgactgggaaaaccctggcgttacccaacttaatcgccttgcagcacatccccctttcgccagctggcgtaatagcgaagaggcccgcaccgatcgcccttcccaacagttgcgcagcctgaatggcgaatggacgcgccctgtagcggcgcattaagcgcggcgggtgtggtggttacgcgcagcgtgaccgctacacttgccagcgccctagcgcccgctcctttcgctttcttcccttcctttctcgccacgttcgccggctttccccgtcaagctctaaatcgggggctccctttagggttccgatttagtgctttacggcacctcgaccccaaaaaacttgattagggtgatggttcacgtagtgggccatcgccctgatagacggtttttcgccctttgacgttggagtccacgttctttaatagtggactcttgttccaaactggaacaacactcaaccctatctcggtctattcttttgatttataagggattttgccgatttcggcctattggttaaaaaatgagctgatttaacaaaaatttaacgcgaattttaacaaaattcagggcgcaagggctgctaaaggaagcggaacacgtagaaagccagtccgcagaaacggtgctgaccccggatgaatgtcagctactgggctatctggacaagggaaaacgcaagcgcaaagagaaagcaggtagcttgcagtgggcttacatggcgatagctagactgggcggttttatggacagcaagcgaaccggaattgccagctggggcgccctctggtaaggttgggaagccctgcaaagtaaactggatggctttcttgccgccaaggatctgatggcgcaggggatcaagatctgatcaagagacaggatgaggatcgtttcgcatgattgaacaagatggattgcacgcaggttctccggccgcttgggtggagaggctattcggctatgactgggcacaacagacaatcggctgctctgatgccgccgtgttccggctgtcagcgcaggggcgcccggttctttttgtcaagaccgacctgtccggtgccctgaatgaactgcaggacgaggcagcgcggctatcgtggctggccacgacgggcgttccttgcgcagctgtgctcgacgttgtcactgaagcgggaagggactggctgctattgggcgaagtgccggggcaggatctcctgtcatcccaccttgctcctgccgagaaagtatccatcatggctgatgcaatgcggcggctgcatacgcttgatccggctacctgcccattcgaccaccaagcgaaacatcgcatcgagcgagcacgtactcggatggaagccggtcttgtcgatcaggatgatctggacgaagagcatcaggggctcgcgccagccgaactgttcgccaggctcaaggcgcgcatgcccgacggcgaggatctcgtcgtgacccatggcgatgcctgcttgccgaatatcatggtggaaaatggccgcttttctggattcatcgactgtggccggctgggtgtggcggaccgctatcaggacatagcgttggctacccgtgatattgctgaagagcttggcggcgaatgggctgaccgcttcctcgtgctttacggtatcgccgctcccgattcgcagcgcatcgccttctatcgccttcttgacgagttcttctgaattgaaaaaggaagagtatgagtattcaacatttccgtgtcgcccttattcccttttttgcggcattttgccttcctgtttttgctcacccagaaacgctggtgaaagtaaaagatgctgaagatcagttgggtgcacgagtgggttacatcgaactggatctcaacagcggtaagatccttgagagttttcgccccgaagaacgttttccaatgatgagcacttttaaagttctgctatgtggcgcggtattatcccgtattgacgccgggcaagagcaactcggtcgccgcatacactattctcagaatgacttggttgagtactcaccagtcacagaaaagcatcttacggatggcatgacagtaagagaattatgcagtgctgccataaccatgagtgataacactgcggccaacttacttctgacaacgatcggaggaccgaaggagctaaccgcttttttgcacaacatgggggatcatgtaactcgccttgatcgttgggaaccggagctgaatgaagccataccaaacgacgagcgtgacaccacgatgcctgtagcaatggcaacaacgttgcgcaaactattaactggcgaactacttactctagcttcccggcaacaattaatagactggatggaggcggataaagttgcaggaccacttctgcgctcggcccttccggctggctggtttattgctgataaatctggagccggtgagcgtgggtctcgcggtatcattgcagcactggggccagatggtaagccctcccgtatcgtagttatctacacgacggggagtcaggcaactatggatgaacgaaatagacagatcgctgagataggtgcctcactgattaagcattggtaactgtcagaccaagtttactcatatatactttagattgatttaaaacttcatttttaatttaaaaggatctaggtgaagatcctttttgataatctcatgaccaaaatcccttaacgtgagttttcgttccactgagcgtcagaccccgtagaaaagatcaaaggatcttcttgagatcctttttttctgcgcgtaatctgctgcttgcaaacaaaaaaaccaccgctaccagcggtggtttgtttgccggatcaagagctaccaactctttttccgaaggtaactggcttcagcagagcgcagataccaaatactgttcttctagtgtagccgtagttaggccaccacttcaagaactctgtagcaccgcctacatacctcgctctgctaatcctgttaccagtggctgctgccagtggcgataagtcgtgtcttaccgggttggactcaagacgatagttaccggataaggcgcagcggtcgggctgaacggggggttcgtgcacacagcccagcttggagcgaacgacctacaccgaactgagatacctacagcgtgagctatgagaaagcgccacgcttcccgaagggagaaaggcggacaggtatccggtaagcggcagggtcggaacaggagagcgcacgagggagcttccagggggaaacgcctggtatctttatagtcctgtcgggtttcgccacctctgacttgagcgtcgatttttgtgatgctcgtcaggggggcggagcctatggaaaaacgccagcaacgcggcctttttacggttcctggccttttgctggccttttgctcacatgttctttcctgcgttatcccctgattctgtggataaccgtattaccgcctttgagtgagctgataccgctcgccgcagccgaacgttgtttaattctgtgagcgtatggcaaacgagcgcccaatacgcaaaccgcctctccccgcgcgttggccgattcattaatgcagctggcacgacaggtttcccgactggaaagcgggcagtgagcgcaacgcaattaatgtgagttagctcactcattaggcaccccaggctttacactttatgcttccggctcgtatgttgtgtggaattgtgagcggataacaatttcacacaggaaacagctatgaccatgattacgccaagctttgttacagatggaagggtcaaacttaataaaggatatttgttcgactttgtgattagtttgatgcgattcaaaaaagaatcctctctagctaccaccgcaatagatcctgttagatacatagatcctcgtcgtgatatcgcattttctaacgtgatggatatattaaagtcgaataaagtgaacaataattaattctttattgtcatcatgaacggcggacatattcagttgataatcggccccatgttttcaggtaaaagtacagaattaattagacgagttagacgttatcaaatagctcaatataaatgcgtgactataaaatattctaacgataatagatacggaacgggactatggacgcatgataagaataattttgaagcattggaagcaactaaactatgtgatgtcttggaatcaattacagatttctccgtgataggtatcgatgaaggacagttctttccagacattgtttaattctgtgagcgtatggcaaacggtaccgagctcttttttttttttttttttttggcatataaataagtcgacccaccatggagacagacacactcctgctatgggtactgctgctctgggttccaggttccactggtgacgaggtccaactggtggagtcagggggagggctggtccagcctggagggtccctgaggctctcctgtgcagcctctggattcactatcagcgactactggatccactgggttcgccaggccccgggcaagggcctggagtgggtcgcaggaatcaccccagccggtggttacacctactacgccgactcagtcaagggacgattcaccatctccgccgacacctccaagaacaccgcctacctgcaaatgaacagcctgagggccgaggacacggccgtgtattactgtgcaaggttcgtgttcttcctgccatatgccatggactactggggccaagggaccctggtcaccgtctcctcaggtggtggcggttcaggcggaggtggctctggcggtggcggatcggacattcagatgacccagtctccaagctccctgtccgctagcgtcggagacagggtcactatcacttgcagagcttcccaggacgtctccactgcagtggcatggtaccagcagaagccagggaaggcaccaaagctccttatttactcagcaagcttcctttactccggagtcccatcccgattcagcggcagcggcagtggcacagattttaccctcacaatttcaagcctccaaccagaggatttcgcaacctactactgtcaacaaggctacggcaacccattcaccttcgggcaagggaccaaggttgagattaagcgagactacaaggatgacgacgacaagtaattaat

SEQ ID NO: 103 - DNA, 7082 bp, Artificial Sequence
  pcDNA-RG vector
gacggatcgggagatctcccgatcccctatggtgcactctcagtacaatctgctctgatgccgcatagttaagccagtatctgctccctgcttgtgtgttggaggtcgctgagtagtgcgcgagcaaaatttaagctacaacaaggcaaggcttgaccgacaattgcatgaagaatctgcttagggttaggcgttttgcgctgcttcgcgatgtacgggccagatatacgcgttgacattgattattgactagttattaatagtaatcaattacggggtcattagttcatagcccatatatggagttccgcgttacataacttacggtaaatggcccgcctggctgaccgcccaacgacccccgcccattgacgtcaataatgacgtatgttcccatagtaacgccaatagggactttccattgacgtcaatgggtggagtatttacggtaaactgcccacttggcagtacatcaagtgtatcatatgccaagtacgccccctattgacgtcaatgacggtaaatggcccgcctggcattatgcccagtacatgaccttatgggactttcctacttggcagtacatctacgtattagtcatcgctattaccatggtgatgcggttttggcagtacatcaatgggcgtggatagcggtttgactcacggggatttccaagtctccaccccattgacgtcaatgggagtttgttttggcaccaaaatcaacgggactttccaaaatgtcgtaacaactccgccccattgacgcaaatgggcggtaggcgtgtacggtgggaggtctatataagcagagctctctggctaactagagaacccactgcttactggcttatcgaaattaatacgactcactatagggagacccaagctggctagcgtttaaacttaagcttggtaccgagctcggatccactagtccagtgtggtggaattcagcttaaagatgacttcgaaagtttatgatccagaacaaaggaaacggatgataactggtccgcagtggtgggccagatgtaaacaaatgaatgttcttgattcatttattaattattatgattcagaaaaacatgcagaaaatgctgttatttttttacatggtaacgcggcctcttcttatttatggcgacatgttgtgccacatattgagccagtagcgcggtgtattataccagatcttattggtatgggcaaatcaggcaaatctggtaatggttcttataggttacttgatcattacaaatatcttactgcatggtttgaacttcttaatttaccaaagaagatcatttttgtcggccatgattggggtgcttgtttggcatttcattatagctatgagcatcaagataagatcaaagcaatagttcacgctgaaagtgtagtagatgtgattgaatcatgggatgaatggcctgatattgaagaagatattgcgttgatcaaatctgaagaaggagaaaaaatggttttggagaataacttcttcgtggaaaccatgttgccatcaaaaatcatgagaaagttagaaccagaagaatttgcagcatatcttgaaccattcaaagagaaaggtgaagttcgtcgtccaacattatcatggcctcgtgaaatcccgttagtaaaaggtggtaaacctgacgttgtacaaattgttaggaattataatgcttatctacgtgcaagtgatgatttaccaaaaatgtttattgaatcggatccaggattcttttccaatgctattgttgaaggcgccaagaagtttcctaatactgaatttgtcaaagtaaaaggtcttcatttttcgcaagaagatgcacctgatgaaatgggaaaatatatcaaatcgttcgttgagcgagttctcaaaaatgaacaagcggccgccgccaccatgagcaagggcgaggaactgttcactggcgtggtcccaattctcgtggaactggatggcgatgtgaatgggcacaaattttctgtcagcggagagggtgaaggtgatgccacatacggaaagctcaccctgaaattcatctgcaccactggaaagctccctgtgccatggccaacactggtcactaccttcacctatggcgtgcagtgcttttccagatacccagaccatatgaagcagcatgactttttcaagagcgccatgcccgagggctatgtgcaggagagaaccatctttttcaaagatgacgggaactacaagacccgcgctgaagtcaagttcgaaggtgacaccctggtgaatagaatcgagctgaagggcattgactttaaggaggatggaaacattctcggccacaagctggaatacaactataactcccacaatgtgtacatcatggccgacaagcaaaagaatggcatcaaggtcaacttcaagatcagacacaacattgaggatggatccgtgcagctggccgaccattatcaacagaacactccaatcggcgacggccctgtgctcctcccagacaaccattacctgtccacccagtctgccctgtctaaagatcccaacgaaaagagagaccacatggtcctgctggagtttgtgaccgctgctgggatcacacatggcatggacgagctgtacaagtgagcggccgctcgagtctagagggcccgtttaaacccgctgatcagcctcgactgtgccttctagttgccagccatctgttgtttgcccctcccccgtgccttccttgaccctggaaggtgccactcccactgtcctttcctaataaaatgaggaaattgcatcgcattgtctgagtaggtgtcattctattctggggggtggggtggggcaggacagcaagggggaggattgggaagacaatagcaggcatgctggggatgcggtgggctctatggcttctgaggcggaaagaaccagctggggctctagggggtatccccacgcgccctgtagcggcgcattaagcgcggcgggtgtggtggttacgcgcagcgtgaccgctacacttgccagcgccctagcgcccgctcctttcgctttcttcccttcctttctcgccacgttcgccggctttccccgtcaagctctaaatcgggggctccctttagggttccgatttagtgctttacggcacctcgaccccaaaaaacttgattagggtgatggttcacgtagtgggccatcgccctgatagacggtttttcgccctttgacgttggagtccacgttctttaatagtggactcttgttccaaactggaacaacactcaaccctatctcggtctattcttttgatttataagggattttgccgatttcggcctattggttaaaaaatgagctgatttaacaaaaatttaacgcgaattaattctgtggaatgtgtgtcagttagggtgtggaaagtccccaggctccccagcaggcagaagtatgcaaagcatgcatctcaattagtcagcaaccaggtgtggaaagtccccaggctccccagcaggcagaagtatgcaaagcatgcatctcaattagtcagcaaccatagtcccgcccctaactccgcccatcccgcccctaactccgcccagttccgcccattctccgccccatggctgactaattttttttatttatgcagaggccgaggccgcctctgcctctgagctattccagaagtagtgaggaggcttttttggaggcctaggcttttgcaaaaagctcccgggagcttgtatatccattttcggatctgatcaagagacaggatgaggatcgtttcgcatgattgaacaagatggattgcacgcaggttctccggccgcttgggtggagaggctattcggctatgactgggcacaacagacaatcggctgctctgatgccgccgtgttccggctgtcagcgcaggggcgcccggttctttttgtcaagaccgacctgtccggtgccctgaatgaactgcaggacgaggcagcgcggctatcgtggctggccacgacgggcgttccttgcgcagctgtgctcgacgttgtcactgaagcgggaagggactggctgctattgggcgaagtgccggggcaggatctcctgtcatctcaccttgctcctgccgagaaagtatccatcatggctgatgcaatgcggcggctgcatacgcttgatccggctacctgcccattcgaccaccaagcgaaacatcgcatcgagcgagcacgtactcggatggaagccggtcttgtcgatcaggatgatctggacgaagagcatcaggggctcgcgccagccgaactgttcgccaggctcaaggcgcgcatgcccgacggcgaggatctcgtcgtgacccatggcgatgcctgcttgccgaatatcatggtggaaaatggccgcttttctggattcatcgactgtggccggctgggtgtggcggaccgctatcaggacatagcgttggctacccgtgatattgctgaagagcttggcggcgaatgggctgaccgcttcctcgtgctttacggtatcgccgctcccgattcgcagcgcatcgccttctatcgccttcttgacgagttcttctgagcgggactctggggttcgaaatgaccgaccaagcgacgcccaacctgccatcacgagatttcgattccaccgccgccttctatgaaaggttgggcttcggaatcgttttccgggacgccggctggatgatcctccagcgcggggatctcatgctggagttcttcgcccaccccaacttgtttattgcagcttataatggttacaaataaagcaatagcatcacaaatttcacaaataaagcatttttttcactgcattctagttgtggtttgtccaaactcatcaatgtatcttatcatgtctgtataccgtcgacctctagctagagcttggcgtaatcatggtcatagctgtttcctgtgtgaaattgttatccgctcacaattccacacaacatacgagccggaagcataaagtgtaaagcctggggtgcctaatgagtgagctaactcacattaattgcgttgcgctcactgcccgctttccagtcgggaaacctgtcgtgccagctgcattaatgaatcggccaacgcgcggggagaggcggtttgcgtattgggcgctcttccgcttcctcgctcactgactcgctgcgctcggtcgttcggctgcggcgagcggtatcagctcactcaaaggcggtaatacggttatccacagaatcaggggataacgcaggaaagaacatgtgagcaaaaggccagcaaaaggccaggaaccgtaaaaaggccgcgttgctggcgtttttccataggctccgcccccctgacgagcatcacaaaaatcgacgctcaagtcagaggtggcgaaacccgacaggactataaagataccaggcgtttccccctggaagctccctcgtgcgctctcctgttccgaccctgccgcttaccggatacctgtccgcctttctcccttcgggaagcgtggcgctttctcatagctcacgctgtaggtatctcagttcggtgtaggtcgttcgctccaagctgggctgtgtgcacgaaccccccgttcagcccgaccgctgcgccttatccggtaactatcgtcttgagtccaacccggtaagacacgacttatcgccactggcagcagccactggtaacaggattagcagagcgaggtatgtaggcggtgctacagagttcttgaagtggtggcctaactacggctacactagaagaacagtatttggtatctgcgctctgctgaagccagttaccttcggaaaaagagttggtagctcttgatccggcaaacaaaccaccgctggtagcggtttttttgtttgcaagcagcagattacgcgcagaaaaaaaggatctcaagaagatcctttgatcttttctacggggtctgacgctcagtggaacgaaaactcacgttaagggattttggtcatgagattatcaaaaaggatcttcacctagatccttttaaattaaaaatgaagttttaaatcaatctaaagtatatatgagtaaacttggtctgacagttaccaatgcttaatcagtgaggcacctatctcagcgatctgtctatttcgttcatccatagttgcctgactccccgtcgtgtagataactacgatacgggagggcttaccatctggccccagtgctgcaatgataccgcgagacccacgctcaccggctccagatttatcagcaataaaccagccagccggaagggccgagcgcagaagtggtcctgcaactttatccgcctccatccagtctattaattgttgccgggaagctagagtaagtagttcgccagttaatagtttgcgcaacgttgttgccattgctacaggcatcgtggtgtcacgctcgtcgtttggtatggcttcattcagctccggttcccaacgatcaaggcgagttacatgatcccccatgttgtgcaaaaaagcggttagctccttcggtcctccgatcgttgtcagaagtaagttggccgcagtgttatcactcatggttatggcagcactgcataattctcttactgtcatgccatccgtaagatgcttttctgtgactggtgagtactcaaccaagtcattctgagaatagtgtatgcggcgaccgagttgctcttgcccggcgtcaatacgggataataccgcgccacatagcagaactttaaaagtgctcatcattggaaaacgttcttcggggcgaaaactctcaaggatcttaccgctgttgagatccagttcgatgtaacccactcgtgcacccaactgatcttcagcatcttttactttcaccagcgtttctgggtgagcaaaaacaggaaggcaaaatgccgcaaaaaagggaataagggcgacacggaaatgttgaatactcatactcttcctttttcaatattattgaagcatttatcagggttattgtctcatgagcggatacatatttgaatgtatttagaaaaataaacaaataggggttccgcgcacatttccccgaaaagtgccacctgacgtc

SEQ ID NO: 104 - DNA, 5775 bp, Artificial Sequence
  pF14.5-SEL-RG vector
gacgtctaagaaaccattattatcatgacattaacctataaaaataggcgtatcacgaggccctttcgtctcgcgcgtttcggtgatgacggtgaaaacctctgacacatgcagctcccggagacggtcacagcttgtctgtaagcggatgccgggagcagacaagcccgtcagggcgcgtcagcgggtgttggcgggtgtcggggctggcttaactatgcggcatcagagcagattgtactgagagtgcaccatatgtagaagaattgataaatatgaaaccttttaagaatatgaataaaataacaattaatcaaaaggataattgtatattagcaaatcgatgctttgttaaaatagatactcctagatacataccatcgacatccattagcagttctaatatcatcagaatacggaatcatgattttacattatctgaattattgtattcaccgtttcattttcaacagcctcagtttcaatatctccttcctgggtttgtattaacgtgtattgataaagtttcgaaacagcaaaaagaatgtaaatattgtatctctaatcgtggagatgatgatagtttaagcattaatctatttattccgactattaacaagtctatatatattattatcggtttacggatgaaaaatttttggaagcctaaattcgaaatagaataatgtttttatattatacatgtgctaaaagaatgatcgatacagtttaagtgaaagctagagaggggtttttaaatggtcatcggtttagtcatattcgtgtctgtaagcttaaaaattgaaattttattttttttttttggaatataaatgacttcgaaagtttatgatccagaacaaaggaaacggatgataactggtccgcagtggtgggccagatgtaaacaaatgaatgttcttgattcatttattaattattatgattcagaaaaacatgcagaaaatgctgttatttttttacatggtaacgcggcctcttcttatttatggcgacatgttgtgccacatattgagccagtagcgcggtgtattataccagatcttattggtatgggcaaatcaggcaaatctggtaatggttcttataggttacttgatcattacaaatatcttactgcatggtttgaacttcttaatttaccaaagaagatcatttttgtcggccatgattggggtgcttgtttggcatttcattatagctatgagcatcaagataagatcaaagcaatagttcacgctgaaagtgtagtagatgtgattgaatcatgggatgaatggcctgatattgaagaagatattgcgttgatcaaatctgaagaaggagaaaaaatggttttggagaataacttcttcgtggaaaccatgttgccatcaaaaatcatgagaaagttagaaccagaagaatttgcagcatatcttgaaccattcaaagagaaaggtgaagttcgtcgtccaacattatcatggcctcgtgaaatcccgttagtaaaaggtggtaaacctgacgttgtacaaattgttaggaattataatgcttatctacgtgcaagtgatgatttaccaaaaatgtttattgaatcggatccaggattcttttccaatgctattgttgaaggcgccaagaagtttcctaatactgaatttgtcaaagtaaaaggtcttcatttttcgcaagaagatgcacctgatgaaatgggaaaatatatcaaatcgttcgttgagcgagttctcaaaaatgaacaagcggccgccgccaccatgagcaagggcgaggaactgttcactggcgtggtcccaattctcgtggaactggatggcgatgtgaatgggcacaaattttctgtcagcggagagggtgaaggtgatgccacatacggaaagctcaccctgaaattcatctgcaccactggaaagctccctgtgccatggccaacactggtcactaccttcacctatggcgtgcagtgcttttccagatacccagaccatatgaagcagcatgactttttcaagagcgccatgcccgagggctatgtgcaggagagaaccatctttttcaaagatgacgggaactacaagacccgcgctgaagtcaagttcgaaggtgacaccctggtgaatagaatcgagctgaagggcattgactttaaggaggatggaaacattctcggccacaagctggaatacaactataactcccacaatgtgtacatcatggccgacaagcaaaagaatggcatcaaggtcaacttcaagatcagacacaacattgaggatggatccgtgcagctggccgaccattatcaacagaacactccaatcggcgacggccctgtgctcctcccagacaaccattacctgtccacccagtctgccctgtctaaagatcccaacgaaaagagagaccacatggtcctgctggagtttgtgaccgctgctgggatcacacatggcatggacgagctgtacaagtgaaagggcgaattctgcagatgatcctgcggccgccatcgtcggtgtgttgtctaacgtattggacatgtttatgtacgtagaagaaaataatgaagaggatgctagaatcaaggaggagcaagaactactgttgctatattaatacataattgaaaatctaccaacttaaatacaccgcctataaatttacaatgaaacacagattgtattctgaaggattgagtattagtaatgatttaaactcgataatcggtcaacaatctacaatggatacggatatagaaatagacgaagatgacatcatggaacttcttaatatattgactgagttaggttgtgatgtcgactttgatgaaaattttagcgatatagccgatgatattctagaatcgttgatagaacaggatgtataagtttttatgttaactaaatgtggccatttgcatcggtacctgcgggagcaaaatgtaggctggtagaaacactaccagaaaatatggattttagatccgatcatttaacaacatttgaatgttttaacgaaattatcactctagctaagaaatatatatacatagcatctttttgttgtaatcctctgaattctagaaaagtagaaaatatattctaatttattgcacgggatgagcgaaaaatacatcgtcacctgggacatgttgcagatccatgcacgtaaactcgcaagccgactgatgccttctgaacaatggaaaggcattattgccgtaagccgtggcggtctggtaccgggtgcgttactggcgcgtgaactgggtattcgtcatgtcgataccgtttgtatttccagctacgatcacgacaaccagcgcgagcttaaagtgctgaaacgcgcagaaggcgatggcgaaggcttcatcgttattgatgacctggtggataccggtggtactgcggttgcgattcgtgaaatgtatccaaaagcgcactttgtcaccatcttcgcaaaaccggctggtcgtccgctggttgatgactatgttgttgatatcccgcaagatacctggattgaacagccgtgggatatgggcgtcgtattcgtcccgccaatctccggtcgctaaggatcagcttggcgtaatcatggtcatagctgtttcctgtgtgaaattgttatccgctcacaattccacacaacatacgagccggaagcataaagtgtaaagcctggggtgcctaatgagtgagctaactcacattaattgcgttgcgctcactgcccgctttccagtcgggaaacctgtcgtgccagctgcattaatgaatcggccaacgcgcggggagaggcggtttgcgtattgggcgctcttccgcttcctcgctcactgactcgctgcgctcggtcgttcggctgcggcgagcggtatcagctcactcaaaggcggtaatacggttatccacagaatcaggggataacgcaggaaagaacatgtgagcaaaaggccagcaaaaggccaggaaccgtaaaaaggccgcgttgctggcgtttttccataggctccgcccccctgacgagcatcacaaaaatcgacgctcaagtcagaggtggcgaaacccgacaggactataaagataccaggcgtttccccctggaagctccctcgtgcgctctcctgttccgaccctgccgcttaccggatacctgtccgcctttctcccttcgggaagcgtggcgctttctcatagctcacgctgtaggtatctcagttcggtgtaggtcgttcgctccaagctgggctgtgtgcacgaaccccccgttcagcccgaccgctgcgccttatccggtaactatcgtcttgagtccaacccggtaagacacgacttatcgccactggcagcagccactggtaacaggattagcagagcgaggtatgtaggcggtgctacagagttcttgaagtggtggcctaactacggctacactagaaggacagtatttggtatctgcgctctgctgaagccagttaccttcggaaaaagagttggtagctcttgatccggcaaacaaaccaccgctggtagcggtggtttttttgtttgcaagcagcagattacgcgcagaaaaaaaggatctcaagaagatcctttgatcttttctacggggtctgacgctcagtggaacgaaaactcacgttaagggattttggtcatgagattatcaaaaaggatcttcacctagatccttttaaattaaaaatgaagttttaaatcaatctaaagtatatatgagtaaacttggtctgacagttaccaatgcttaatcagtgaggcacctatctcagcgatctgtctatttcgttcatccatagttgcctgactccccgtcgtgtagataactacgatacgggagggcttaccatctggccccagtgctgcaatgataccgcgagacccacgctcaccggctccagatttatcagcaataaaccagccagccggaagggccgagcgcagaagtggtcctgcaactttatccgcctccatccagtctattaattgttgccgggaagctagagtaagtagttcgccagttaatagtttgcgcaacgttgttgccattgctacaggcatcgtggtgtcacgctcgtcgtttggtatggcttcattcagctccggttcccaacgatcaaggcgagttacatgatcccccatgttgtgcaaaaaagcggttagctccttcggtcctccgatcgttgtcagaagtaagttggccgcagtgttatcactcatggttatggcagcactgcataattctcttactgtcatgccatccgtaagatgcttttctgtgactggtgagtactcaaccaagtcattctgagaatagtgtatgcggcgaccgagttgctcttgcccggcgtcaatacgggataataccgcgccacatagcagaactttaaaagtgctcatcattggaaaacgttcttcggggcgaaaactctcaaggatcttaccgctgttgagatccagttcgatgtaacccactcgtgcacccaactgatcttcagcatcttttactttcaccagcgtttctgggtgagcaaaaacaggaaggcaaaatgccgcaaaaaagggaataagggcgacacggaaatgttgaatactcatactcttcctttttcaatattattgaagcatttatcagggttattgtctcatgagcggatacatatttgaatgtatttagaaaaataaacaaataggggttccgcgcacatttccccgaaaagtgccacct

SEQ ID NO: 105 - DNA, 5230 bp, Artificial Sequence
  pCRII-SEL-RG
agcgcccaatacgcaaaccgcctctccccgcgcgttggccgattcattaatgcagctggcacgacaggtttcccgactggaaagcgggcagtgagcgcaacgcaattaatgtgagttagctcactcattaggcaccccaggctttacactttatgcttccggctcgtatgttgtgtggaattgtgagcggataacaatttcacacaggaaacagctatgaccatgattacgccaagctatttaggtgacactatagaatactcaagctatgcatcaagcttggtaccgagctcggatccactagtaacggccgccagtgtgctggaattcgcccttatcaagcttaaaaattgaaattttattttttttttttggaatataaatgacttcgaaagtttatgatccagaacaaaggaaacggatgataactggtccgcagtggtgggccagatgtaaacaaatgaatgttcttgattcatttattaattattatgattcagaaaaacatgcagaaaatgctgttatttttttacatggtaacgcggcctcttcttatttatggcgacatgttgtgccacatattgagccagtagcgcggtgtattataccagatcttattggtatgggcaaatcaggcaaatctggtaatggttcttataggttacttgatcattacaaatatcttactgcatggtttgaacttcttaatttaccaaagaagatcatttttgtcggccatgattggggtgcttgtttggcatttcattatagctatgagcatcaagataagatcaaagcaatagttcacgctgaaagtgtagtagatgtgattgaatcatgggatgaatggcctgatattgaagaagatattgcgttgatcaaatctgaagaaggagaaaaaatggttttggagaataacttcttcgtggaaaccatgttgccatcaaaaatcatgagaaagttagaaccagaagaatttgcagcatatcttgaaccattcaaagagaaaggtgaagttcgtcgtccaacattatcatggcctcgtgaaatcccgttagtaaaaggtggtaaacctgacgttgtacaaattgttaggaattataatgcttatctacgtgcaagtgatgatttaccaaaaatgtttattgaatcggatccaggattcttttccaatgctattgttgaaggcgccaagaagtttcctaatactgaatttgtcaaagtaaaaggtcttcatttttcgcaagaagatgcacctgatgaaatgggaaaatatatcaaatcgttcgttgagcgagttctcaaaaatgaacaagcggccgccgccaccatgagcaagggcgaggaactgttcactggcgtggtcccaattctcgtggaactggatggcgatgtgaatgggcacaaattttctgtcagcggagagggtgaaggtgatgccacatacggaaagctcaccctgaaattcatctgcaccactggaaagctccctgtgccatggccaacactggtcactaccttcacctatggcgtgcagtgcttttccagatacccagaccatatgaagcagcatgactttttcaagagcgccatgcccgagggctatgtgcaggagagaaccatctttttcaaagatgacgggaactacaagacccgcgctgaagtcaagttcgaaggtgacaccctggtgaatagaatcgagctgaagggcattgactttaaggaggatggaaacattctcggccacaagctggaatacaactataactcccacaatgtgtacatcatggccgacaagcaaaagaatggcatcaaggtcaacttcaagatcagacacaacattgaggatggatccgtgcagctggccgaccattatcaacagaacactccaatcggcgacggccctgtgctcctcccagacaaccattacctgtccacccagtctgccctgtctaaagatcccaacgaaaagagagaccacatggtcctgctggagtttgtgaccgctgctgggatcacacatggcatggacgagctgtacaagtgaaagggcgaattctgcagatatccatcacactggcggccgctcgagcatgcatctagagggcccaattcgccctatagtgagtcgtattacaattcactggccgtcgttttacaacgtcgtgactgggaaaaccctggcgttacccaacttaatcgccttgcagcacatccccctttcgccagctggcgtaatagcgaagaggcccgcaccgatcgcccttcccaacagttgcgcagcctatacgtacggcagtttaaggtttacacctataaaagagagagccgttatcgtctgtttgtggatgtacagagtgatattattgacacgccggggcgacggatggtgatccccctggccagtgcacgtctgctgtcagataaagtctcccgtgaactttacccggtggtgcatatcggggatgaaagctggcgcatgatgaccaccgatatggccagtgtgccggtctccgttatcggggaagaagtggctgatctcagccaccgcgaaaatgacatcaaaaacgccattaacctgatgttctggggaatataaatgtcaggcatgagattatcaaaaaggatcttcacctagatccttttcacgtagaaagccagtccgcagaaacggtgctgaccccggatgaatgtcagctactgggctatctggacaagggaaaacgcaagcgcaaagagaaagcaggtagcttgcagtgggcttacatggcgatagctagactgggcggttttatggacagcaagcgaaccggaattgccagctggggcgccctctggtaaggttgggaagccctgcaaagtaaactggatggctttctcgccgccaaggatctgatggcgcaggggatcaagctctgatcaagagacaggatgaggatcgtttcgcatgattgaacaagatggattgcacgcaggttctccggccgcttgggtggagaggctattcggctatgactgggcacaacagacaatcggctgctctgatgccgccgtgttccggctgtcagcgcaggggcgcccggttctttttgtcaagaccgacctgtccggtgccctgaatgaactgcaagacgaggcagcgcggctatcgtggctggccacgacgggcgttccttgcgcagctgtgctcgacgttgtcactgaagcgggaagggactggctgctattgggcgaagtgccggggcaggatctcctgtcatctcaccttgctcctgccgagaaagtatccatcatggctgatgcaatgcggcggctgcatacgcttgatccggctacctgcccattcgaccaccaagcgaaacatcgcatcgagcgagcacgtactcggatggaagccggtcttgtcgatcaggatgatctggacgaagagcatcaggggctcgcgccagccgaactgttcgccaggctcaaggcgagcatgcccgacggcgaggatctcgtcgtgacccatggcgatgcctgcttgccgaatatcatggtggaaaatggccgcttttctggattcatcgactgtggccggctgggtgtggcggaccgctatcaggacatagcgttggctacccgtgatattgctgaagagcttggcggcgaatgggctgaccgcttcctcgtgctttacggtatcgccgctcccgattcgcagcgcatcgccttctatcgccttcttgacgagttcttctgaattattaacgcttacaatttcctgatgcggtattttctccttacgcatctgtgcggtatttcacaccgcatacaggtggcacttttcggggaaatgtgcgcggaacccctatttgtttatttttctaaatacattcaaatatgtatccgctcatgagacaataaccctgataaatgcttcaataatagcacgtgaggagggccaccatggccaagttgaccagtgccgttccggtgctcaccgcgcgcgacgtcgccggagcggtcgagttctggaccgaccggctcgggttctcccgggacttcgtggaggacgacttcgccggtgtggtccgggacgacgtgaccctgttcatcagcgcggtccaggaccaggtggtgccggacaacaccctggcctgggtgtgggtgcgcggcctggacgagctgtacgccgagtggtcggaggtcgtgtccacgaacttccgggacgcctccgggccggccatgaccgagatcggcgagcagccgtgggggcgggagttcgccctgcgcgacccggccggcaactgcgtgcacttcgtggccgaggagcaggactgacacgtgctaaaacttcatttttaatttaaaaggatctaggtgaagatcctttttgataatctcatgaccaaaatcccttaacgtgagttttcgttccactgagcgtcagaccccgtagaaaagatcaaaggatcttcttgagatcctttttttctgcgcgtaatctgctgcttgcaaacaaaaaaaccaccgctaccagcggtggtttgtttgccggatcaagagctaccaactctttttccgaaggtaactggcttcagcagagcgcagataccaaatactgtccttctagtgtagccgtagttaggccaccacttcaagaactctgtagcaccgcctacatacctcgctctgctaatcctgttaccagtggctgctgccagtggcgataagtcgtgtcttaccgggttggactcaagacgatagttaccggataaggcgcagcggtcgggctgaacggggggttcgtgcacacagcccagcttggagcgaacgacctacaccgaactgagatacctacagcgtgagctatgagaaagcgccacgcttcccgaagggagaaaggcggacaggtatccggtaagcggcagggtcggaacaggagagcgcacgagggagcttccagggggaaacgcctggtatctttatagtcctgtcgggtttcgccacctctgacttgagcgtcgatttttgtgatgctcgtcaggggggcggagcctatggaaaaacgccagcaacgcggcctttttacggttcctgggcttttgctggccttttgctcacatgttctttcctgcgttatcccctgattctgtggataaccgtattaccgcctttgagtgagctgataccgctcgccgcagccgaacgaccgagcgcagcgagtcagtgagcgaggaagcggaag

SEQ ID NO: 106 - DNA, 1572 bp, Artificial Sequence
  sIL-6R/IL-6 fusion cDNA
  VARIANT 766: n= unknown
atgctggccgtcggctgcgcgctgctggctgccctgctggccgcgccgggagcggcgctggccccaaggcgctgccctgcgcaggaggtggcgagaggcgtgctgaccagtctgccaggagacagcgtgactctgacctgcccgggggtagagccggaagacaatgccactgttcactgggtgctcaggaagccggctgcaggctcccaccccagcagatgggctggcatgggaaggaggctgctgctgaggtcggtgcagctccacgactctggaaactattcatgctaccgggccggccgcccagctgggactgtgcacttgctggtggatgttccccccgaggagccccagctctcctgcttccggaagagccccctcagcaatgttgtttgtgagtggggtcctcggagcaccccatccctgacgacaaaggctgtgctcttggtgaggaagtttcagaacagtccggccgaagacttccaggagccgtgccagtattcccaggagtcccagaagttctcctgccagttagcagtcccggagggagacagctctttctacatagtgtccatgtgcgtcgccagtagtgtcgggagcaagttcagcaaaactcaaacctttcagggttgtggaatcttgcagcctgatccgcctgccaacatcacagtcactgccgtggccagaaacccccgctggctcagtgtcacctggcaagacccccactcctggaactcatctttctacagactacggtttgagctcngatatcgggctgaacggtcaaagacattcacaacatggatggtcaaggacctccagcatcactgtgtcatccacgacgcctggagcggcctgaggcacgtggtgcagcttcgtgcccaggaggagttcgggcaaggcgagtggagcgagtggagcccggaggccatgggcacgccttggacagaatccaggagtcctccagctcgaggaggtggaggttctggaggtggaggttctgtcgagccagtacccccaggagaagattccaaagatgtagccgccccacacagacagccactcacctcttcagaacgaattgacaaacaaattcggtacatcctcgacggcatctcagccctgagaaaggagacatgtaacaagagtaacatgtgtgaaagcagcaaagaggcactggcagaaaacaacctgaaccttccaaagatggctgaaaaagatggatgcttccaatctggattcaatgaggagacttgcctggtgaaaatcatcactggtcttttggagtttgaggtatacctagagtacctccagaacagatttgagagtagtgaggaacaagccagagctgtgcagatgagtacaaaagtcctgatccagttcctgcagaaaaaggcaaagaatctagatgcaataaccacccctgacccaaccacaaatgccagcctgctgacgaagctgcaggcacagaaccagtggctgcaggacatgacaactcatctcattctgcgcagctttaaggagttcctgcagtccagcctgagggctcttcggcaaatgtagcatgggcac

SEQ ID NO: 107 - DNA, 624 bp, Artificial Sequence
  IL-24 cDNA
atgaattttcaacagaggctgcaaagcctgtggactttagccagcagacccttctgccctcctttgctggcgacagcctctcaaatgcagatggttgtgctcccttgcctgggttttaccctgcttctctggagccaggtatcaggggcccagggccaagaattccactttgggccctgccaagtgaagggggttgttccccagaaactgtgggaagccttctgggctgtgaaagacactatgcaagctcaggataacatcacgagtgcccggctgctgcagcaggaggttctgcagaacgtctcggatgctgagagctgttaccttgtccacaccctgctggagttctacttgaaaactgttttcaaaaactaccacaatagaacagttgaagtcaggactctgaagtcattctctactctggccaacaactttgttctcatcgtgtcacaactgcaacccagtcaagaaaatgagatgttttccatcagagacagtgcacacaggcggtttctgctattccggagagcattcaaacagttggacgtagaagcagctctgaccaaagcccttggggaagtggacattcttctgacctggatgcagaaattctacaagctctga

SEQ ID NO: 108 - DNA, 3956 bp, Artificial Sequence
  pCRII-CSF9 vector
agcgcccaatacgcaaaccgcctctccccgcgcgttggccgattcattaatgcagctggcacgacaggtttcccgactggaaagcgggcagtgagcgcaacgcaattaatgtgagttagctcactcattaggcaccccaggctttacactttatgcttccggctcgtatgttgtgtggaattgtgagcggataacaatttcacacaggaaacagctatgaccatgattacgccaagctatttaggtgacactatagaatactcaagctatgcatcaagcttggtaccgagctcggatccactagtaacggccgccagtgtgctggaattcgccctttagtcgacatgtggctgcagaatttacttttcctgggcattgtggtctacagcctctcagcacccacccgctcacccatcactgtcacccggccttggaagcatgtagaggccatcaaagaagccctgaacctcctggatgacatgcctgtcacattgaatgaagaggtagaagtcgtctctaacgagttctccttcaagaagctaacatgtgtgcagacccgcctgaagatattcgagcagggtctacggggcaatttcaccaaactcaagggcgccttgaacatgacagccagctactaccagacatactgccccccaactccggaaacggactgtgaaacacaagttaccacctatgcggatttcatagacagccttaaaacctttctgactgatatcccctttgaatgcaaaaaaccagtccaaaaatgacccaagggcgaattctgcagatatccatcacactggcggccgctcgagcatgcatctagagggcccaattcgccctatagtgagtcgtattacaattcactggccgtcgttttacaacgtcgtgactgggaaaaccctggcgttacccaacttaatcgccttgcagcacatccccctttcgccagctggcgtaatagcgaagaggcccgcaccgatcgcccttcccaacagttgcgcagcctatacgtacggcagtttaaggtttacacctataaaagagagagccgttatcgtctgtttgtggatgtacagagtgatattattgacacgccggggcgacggatggtgatccccctggccagtgcacgtctgctgtcagataaagtctcccgtgaactttacccggtggtgcatatcggggatgaaagctggcgcatgatgaccaccgatatggccagtgtgccggtctccgttatcggggaagaagtggctgatctcagccaccgcgaaaatgacatcaaaaacgccattaacctgatgttctggggaatataaatgtcaggcatgagattatcaaaaaggatcttcacctagatccttttcacgtagaaagccagtccgcagaaacggtgctgaccccggatgaatgtcagctactgggctatctggacaagggaaaacgcaagcgcaaagagaaagcaggtagcttgcagtgggcttacatggcgatagctagactgggcggttttatggacagcaagcgaaccggaattgccagctggggcgccctctggtaaggttgggaagccctgcaaagtaaactggatggctttctcgccgccaaggatctgatggcgcaggggatcaagctctgatcaagagacaggatgaggatcgtttcgcatgattgaacaagatggattgcacgcaggttctccggccgcttgggtggagaggctattcggctatgactgggcacaacagacaatcggctgctctgatgccgccgtgttccggctgtcagcgcaggggcgcccggttctttttgtcaagaccgacctgtccggtgccctgaatgaactgcaagacgaggcagcgcggctatcgtggctggccacgacgggcgttccttgcgcagctgtgctcgacgttgtcactgaagcgggaagggactggctgctattgggcgaagtgccggggcaggatctcctgtcatctcaccttgctcctgccgagaaagtatccatcatggctgatgcaatgcggcggctgcatacgcttgatccggctacctgcccattcgaccaccaagcgaaacatcgcatcgagcgagcacgtactcggatggaagccggtcttgtcgatcaggatgatctggacgaagagcatcaggggctcgcgccagccgaactgttcgccaggctcaaggcgagcatgcccgacggcgaggatctcgtcgtgacccatggcgatgcctgcttgccgaatatcatggtggaaaatggccgcttttctggattcatcgactgtggccggctgggtgtggcggaccgctatcaggacatagcgttggctacccgtgatattgctgaagagcttggcggcgaatgggctgaccgcttcctcgtgctttacggtatcgccgctcccgattcgcagcgcatcgccttctatcgccttcttgacgagttcttctgaattattaacgcttacaatttcctgatgcggtattttctccttacgcatctgtgcggtatttcacaccgcatacaggtggcacttttcggggaaatgtgcgcggaacccctatttgtttatttttctaaatacattcaaatatgtatccgctcatgagacaataaccctgataaatgcttcaataatagcacgtgaggagggccaccatggccaagttgaccagtgccgttccggtgctcaccgcgcgcgacgtcgccggagcggtcgagttctggaccgaccggctcgggttctcccgggacttcgtggaggacgacttcgccggtgtggtccgggacgacgtgaccctgttcatcagcgcggtccaggaccaggtggtgccggacaacaccctggcctgggtgtgggtgcgcggcctggacgagctgtacgccgagtggtcggaggtcgtgtccacgaacttccgggacgcctccgggccggccatgaccgagatcggcgagcagccgtgggggcgggagttcgccctgcgcgacccggccggcaactgcgtgcacttcgtggccgaggagcaggactgacacgtgctaaaacttcatttttaatttaaaaggatctaggtgaagatcctttttgataatctcatgaccaaaatcccttaacgtgagttttcgttccactgagcgtcagaccccgtagaaaagatcaaaggatcttcttgagatcctttttttctgcgcgtaatctgctgcttgcaaacaaaaaaaccaccgctaccagcggtggtttgtttgccggatcaagagctaccaactctttttccgaaggtaactggcttcagcagagcgcagataccaaatactgtccttctagtgtagccgtagttaggccaccacttcaagaactctgtagcaccgcctacatacctcgctctgctaatcctgttaccagtggctgctgccagtggcgataagtcgtgtcttaccgggttggactcaagacgatagttaccggataaggcgcagcggtcgggctgaacggggggttcgtgcacacagcccagcttggagcgaacgacctacaccgaactgagatacctacagcgtgagctatgagaaagcgccacgcttcccgaagggagaaaggcggacaggtatccggtaagcggcagggtcggaacaggagagcgcacgagggagcttccagggggaaacgcctggtatctttatagtcctgtcgggtttcgccacctctgacttgagcgtcgatttttgtgatgctcgtcaggggggcggagcctatggaaaaacgccagcaacgcggcctttttacggttcctgggcttttgctggccttttgctcacatgttctttcctgcgttatcccctgattctgtggataaccgtattaccgcctttgagtgagctgataccgctcgccgcagccgaacgaccgagcgcagcgagtcagtgagcgaggaagcggaag

SEQ ID NO: 109 - DNA, 4482 bp, Artificial Sequence
  SE-CSF-2 vector
agcgcccaatacgcaaaccgcctctccccgcgcgttggccgattcattaatgcagctggcacgacaggtttcccgactggaaagcgggcagtgagcgcaacgcaattaatgtgagttagctcactcattaggcaccccaggctttacactttatgcttccggctcgtatgttgtgtggaattgtgagcggataacaatttcacacaggaaacagctatgaccatgattacgccaagcttggtaccgagctctccagacattgttgaattagatcgataaaaattaattaattacccaattcgcccttgggtcatttttggactggttttttgcattcaaaggggatatcagtcagaaaggttttaaggctgtctatgaaatccgcataggtggtaacttgtgtttcacagtccgtttccggagttggggggcagtatgtctggtagtagctggctgtcatgttcaaggcgcccttgagtttggtgaaattgccccgtagaccctgctcgaatatcttcaggcgggtctgcacacatgttagcttcttgaaggagaactcgttagagacgacttctacctcttcattcaatgtgacaggcatgtcatccaggaggttcagggcttctttgatggcctctacatgcttccaaggccgggtgacagtgatgggtgagcgggtgggtgctgagaggctgtagaccacaatgcccaggaaaagtaaattctgcagccacatgtcgacttcgagcaaaaaaagacgctagtttttcaatttttgagctcggatccttctgtgagcgtatggcagatggtgccaccgtagtgtactagtaacggccgccagtgtgctggaattctgcagatatccatcacactggcggccgctcgagcatgcatctagagggcccaattcgccctatagtgagtcgtattacaattcactggccgtcgttttacaacgtcgtgactgggaaaaccctggcgttacccaacttaatcgccttgcagcacatccccctttcgccagctggcgtaatagcgaagaggcccgcaccgatcgcccttcccaacagttgcgcagcctgaatggcgaatggacgcgccctgtagcggcgcattaagcgcggcgggtgtggtggttacgcgcagcgtgaccgctacacttgccagcgccctagcgcccgctcctttcgctttcttcccttcctttctcgccacgttcgccggctttccccgtcaagctctaaatcgggggctccctttagggttccgatttagtgctttacggcacctcgaccccaaaaaacttgattagggtgatggttcacgtagtgggccatcgccctgatagacggtttttcgccctttgacgttggagtccacgttctttaatagtggactcttgttccaaactggaacaacactcaaccctatctcggtctattcttttgatttataagggattttgccgatttcggcctattggttaaaaaatgagctgatttaacaaaaatttaacgcgaattttaacaaaattcagggcgcaagggctgctaaaggaagcggaacacgtagaaagccagtccgcagaaacggtgctgaccccggatgaatgtcagctactgggctatctggacaagggaaaacgcaagcgcaaagagaaagcaggtagcttgcagtgggcttacatggcgatagctagactgggcggttttatggacagcaagcgaaccggaattgccagctggggcgccctctggtaaggttgggaagccctgcaaagtaaactggatggctttcttgccgccaaggatctgatggcgcaggggatcaagatctgatcaagagacaggatgaggatcgtttcgcatgattgaacaagatggattgcacgcaggttctccggccgcttgggtggagaggctattcggctatgactgggcacaacagacaatcggctgctctgatgccgccgtgttccggctgtcagcgcaggggcgcccggttctttttgtcaagaccgacctgtccggtgccctgaatgaactgcaggacgaggcagcgcggctatcgtggctggccacgacgggcgttccttgcgcagctgtgctcgacgttgtcactgaagcgggaagggactggctgctattgggcgaagtgccggggcaggatctcctgtcatcccaccttgctcctgccgagaaagtatccatcatggctgatgcaatgcggcggctgcatacgcttgatccggctacctgcccattcgaccaccaagcgaaacatcgcatcgagcgagcacgtactcggatggaagccggtcttgtcgatcaggatgatctggacgaagagcatcaggggctcgcgccagccgaactgttcgccaggctcaaggcgcgcatgcccgacggcgaggatctcgtcgtgacccatggcgatgcctgcttgccgaatatcatggtggaaaatggccgcttttctggattcatcgactgtggccggctgggtgtggcggaccgctatcaggacatagcgttggctacccgtgatattgctgaagagcttggcggcgaatgggctgaccgcttcctcgtgctttacggtatcgccgctcccgattcgcagcgcatcgccttctatcgccttcttgacgagttcttctgaattgaaaaaggaagagtatgagtattcaacatttccgtgtcgcccttattcccttttttgcggcattttgccttcctgtttttgctcacccagaaacgctggtgaaagtaaaagatgctgaagatcagttgggtgcacgagtgggttacatcgaactggatctcaacagcggtaagatccttgagagttttcgccccgaagaacgttttccaatgatgagcacttttaaagttctgctatgtggcgcggtattatcccgtattgacgccgggcaagagcaactcggtcgccgcatacactattctcagaatgacttggttgagtactcaccagtcacagaaaagcatcttacggatggcatgacagtaagagaattatgcagtgctgccataaccatgagtgataacactgcggccaacttacttctgacaacgatcggaggaccgaaggagctaaccgcttttttgcacaacatgggggatcatgtaactcgccttgatcgttgggaaccggagctgaatgaagccataccaaacgacgagcgtgacaccacgatgcctgtagcaatggcaacaacgttgcgcaaactattaactggcgaactacttactctagcttcccggcaacaattaatagactggatggaggcggataaagttgcaggaccacttctgcgctcggcccttccggctggctggtttattgctgataaatctggagccggtgagcgtgggtctcgcggtatcattgcagcactggggccagatggtaagccctcccgtatcgtagttatctacacgacggggagtcaggcaactatggatgaacgaaatagacagatcgctgagataggtgcctcactgattaagcattggtaactgtcagaccaagtttactcatatatactttagattgatttaaaacttcatttttaatttaaaaggatctaggtgaagatcctttttgataatctcatgaccaaaatcccttaacgtgagttttcgttccactgagcgtcagaccccgtagaaaagatcaaaggatcttcttgagatcctttttttctgcgcgtaatctgctgcttgcaaacaaaaaaaccaccgctaccagcggtggtttgtttgccggatcaagagctaccaactctttttccgaaggtaactggcttcagcagagcgcagataccaaatactgttcttctagtgtagccgtagttaggccaccacttcaagaactctgtagcaccgcctacatacctcgctctgctaatcctgttaccagtggctgctgccagtggcgataagtcgtgtcttaccgggttggactcaagacgatagttaccggataaggcgcagcggtcgggctgaacggggggttcgtgcacacagcccagcttggagcgaacgacctacaccgaactgagatacctacagcgtgagctatgagaaagcgccacgcttcccgaagggagaaaggcggacaggtatccggtaagcggcagggtcggaacaggagagcgcacgagggagcttccagggggaaacgcctggtatctttatagtcctgtcgggtttcgccacctctgacttgagcgtcgatttttgtgatgctcgtcaggggggcggagcctatggaaaaacgccagcaacgcggcctttttacggttcctggccttttgctggccttttgctcacatgttctttcctgcgttatcccctgattctgtggataaccgtattaccgcctttgagtgagctgataccgctcgccgcagccgaacgaccgagcgcagcgagtcagtgagcgaggaagcggaag

SEQ ID NO: 110 - DNA, 5990 bp, Artificial Sequence
  TK-SE-CSF-2 vector
agcgcccaatacgcaaaccgcctctccccgcgcgttggccgattcattaatgcagctggcacgacaggtttcccgactggaaagcgggcagtgagcgcaacgcaattaatgtgagttagctcactcattaggcaccccaggctttacactttatgcttccggctcgtatgttgtgtggaattgtgagcggataacaatttcacacaggaaacagctatgaccatgattacgccaagctttgttacagatggaagggtcaaacttaataaaggatatttgttcgactttgtgattagtttgatgcgattcaaaaaagaatcctctctagctaccaccgcaatagatcctgttagatacatagatcctcgtcgtgatatcgcattttctaacgtgatggatatattaaagtcgaataaagtgaacaataattaattctttattgtcatcatgaacggcggacatattcagttgataatcggccccatgttttcaggtaaaagtacagaattaattagacgagttagacgttatcaaatagctcaatataaatgcgtgactataaaatattctaacgataatagatacggaacgggactatggacgcatgataagaataattttgaagcattggaagcaactaaactatgtgatgtcttggaatcaattacagatttctccgtgataggtatcgatgaaggacagttctttccagacattgtttaattctgtgagcgtatggcaaacggtaccgagctcaaaaattgaaaaactagcgtctttttttgctcgaagtcgacatgtggctgcagaatttacttttcctgggcattgtggtctacagcctctcagcacccacccgctcacccatcactgtcacccggccttggaagcatgtagaggccatcaaagaagccctgaacctcctggatgacatgcctgtcacattgaatgaagaggtagaagtcgtctctaacgagttctccttcaagaagctaacatgtgtgcagacccgcctgaagatattcgagcagggtctacggggcaatttcaccaaactcaagggcgccttgaacatgacagccagctactaccagacatactgccccccaactccggaaacggactgtgaaacacaagttaccacctatgcggatttcatagacagccttaaaacctttctgactgatatcccctttgaatgcaaaaaaccagtccaaaaatgacccaagggcgaattgggtaattaattaatttttatcgatctaattcaacaatgtctggagagctcggatccttctgtgagcgtatggcaaacgaaggaaaaatagttatagtagccgcactcgatgggacatttcaacgtaaaccgtttaataatattttgaatcttattccattatctgaaatggtggtaaaactaactgctgtgtgtatgaaatgctttaaggaggcttccttttctaaacgattgggtgaggaaaccgagatagagataataggaggtaatgatatgtatcaatcggtgtgtagaaagtgttacgtcggctcataatattatattttttatctaaaaaactaaaaataaacattgattaaattttaatataatacttaaaaatggatgttgtgtcgttagataaaccgtttatgtattttgaggaaattgataatgagttagattacgaaccagaaagtgcaaatgaggtcgcaaaaaaactgccgtatcaaggacagttaaaactattactaggagaattattttttcttagtaagttacagcgacacggtatattagatggtgccaccgtagtgtactagttaacggccgccagtgtgctggaattctagaaaagtagaaaatatattctaatttattgcacgggatgagcgaaaaatacatcgtcacctgggacatgttgcagatccatgcacgtaaactcgcaagccgactgatgccttctgaacaatggaaaggcattattgccgtaagccgtggcggtctggtaccgggtgcgttactggcgcgtgaactgggtattcgtcatgtcgataccgtttgtatttccagctacgatcacgacaaccagcgcgagcttaaagtgctgaaacgcgcagaaggcgatggcgaaggcttcatcgttattgatgacctggtggataccggtggtactgcggttgcgattcgtgaaatgtatccaaaagcgcactttgtcaccatcttcgcaaaaccggctggtcgtccgctggttgatgactatgttgttgatatcccgcaagatacctggattgaacagccgtgggatatgggcgtcgtattcgtcccgccaatctccggtcgctaaggatcagcttggcgtaatcaagccgaattctgcagatatccatcacactggcggccgctcgagcatgcatctagagggcccaattcgccctatagtgagtcgtattacaattcactggccgtcgttttacaacgtcgtgactgggaaaaccctggcgttacccaacttaatcgccttgcagcacatccccctttcgccagctggcgtaatagcgaagaggcccgcaccgatcgcccttcccaacagttgcgcagcctgaatggcgaatggacgcgccctgtagcggcgcattaagcgcggcgggtgtggtggttacgcgcagcgtgaccgctacacttgccagcgccctagcgcccgctcctttcgctttcttcccttcctttctcgccacgttcgccggctttccccgtcaagctctaaatcgggggctccctttagggttccgatttagtgctttacggcacctcgaccccaaaaaacttgattagggtgatggttcacgtagtgggccatcgccctgatagacggtttttcgccctttgacgttggagtccacgttctttaatagtggactcttgttccaaactggaacaacactcaaccctatctcggtctattcttttgatttataagggattttgccgatttcggcctattggttaaaaaatgagctgatttaacaaaaatttaacgcgaattttaacaaaattcagggcgcaagggctgctaaaggaagcggaacacgtagaaagccagtccgcagaaacggtgctgaccccggatgaatgtcagctactgggctatctggacaagggaaaacgcaagcgcaaagagaaagcaggtagcttgcagtgggcttacatggcgatagctagactgggcggttttatggacagcaagcgaaccggaattgccagctggggcgccctctggtaaggttgggaagccctgcaaagtaaactggatggctttcttgccgccaaggatctgatggcgcaggggatcaagatctgatcaagagacaggatgaggatcgtttcgcatgattgaacaagatggattgcacgcaggttctccggccgcttgggtggagaggctattcggctatgactgggcacaacagacaatcggctgctctgatgccgccgtgttccggctgtcagcgcaggggcgcccggttctttttgtcaagaccgacctgtccggtgccctgaatgaactgcaggacgaggcagcgcggctatcgtggctggccacgacgggcgttccttgcgcagctgtgctcgacgttgtcactgaagcgggaagggactggctgctattgggcgaagtgccggggcaggatctcctgtcatcccaccttgctcctgccgagaaagtatccatcatggctgatgcaatgcggcggctgcatacgcttgatccggctacctgcccattcgaccaccaagcgaaacatcgcatcgagcgagcacgtactcggatggaagccggtcttgtcgatcaggatgatctggacgaagagcatcaggggctcgcgccagccgaactgttcgccaggctcaaggcgcgcatgcccgacggcgaggatctcgtcgtgacccatggcgatgcctgcttgccgaatatcatggtggaaaatggccgcttttctggattcatcgactgtggccggctgggtgtggcggaccgctatcaggacatagcgttggctacccgtgatattgctgaagagcttggcggcgaatgggctgaccgcttcctcgtgctttacggtatcgccgctcccgattcgcagcgcatcgccttctatcgccttcttgacgagttcttctgaattgaaaaaggaagagtatgagtattcaacatttccgtgtcgcccttattcccttttttgcggcattttgccttcctgtttttgctcacccagaaacgctggtgaaagtaaaagatgctgaagatcagttgggtgcacgagtgggttacatcgaactggatctcaacagcggtaagatccttgagagttttcgccccgaagaacgttttccaatgatgagcacttttaaagttctgctatgtggcgcggtattatcccgtattgacgccgggcaagagcaactcggtcgccgcatacactattctcagaatgacttggttgagtactcaccagtcacagaaaagcatcttacggatggcatgacagtaagagaattatgcagtgctgccataaccatgagtgataacactgcggccaacttacttctgacaacgatcggaggaccgaaggagctaaccgcttttttgcacaacatgggggatcatgtaactcgccttgatcgttgggaaccggagctgaatgaagccataccaaacgacgagcgtgacaccacgatgcctgtagcaatggcaacaacgttgcgcaaactattaactggcgaactacttactctagcttcccggcaacaattaatagactggatggaggcggataaagttgcaggaccacttctgcgctcggcccttccggctggctggtttattgctgataaatctggagccggtgagcgtgggtctcgcggtatcattgcagcactggggccagatggtaagccctcccgtatcgtagttatctacacgacggggagtcaggcaactatggatgaacgaaatagacagatcgctgagataggtgcctcactgattaagcattggtaactgtcagaccaagtttactcatatatactttagattgatttaaaacttcatttttaatttaaaaggatctaggtgaagatcctttttgataatctcatgaccaaaatcccttaacgtgagttttcgttccactgagcgtcagaccccgtagaaaagatcaaaggatcttcttgagatcctttttttctgcgcgtaatctgctgcttgcaaacaaaaaaaccaccgctaccagcggtggtttgtttgccggatcaagagctaccaactctttttccgaaggtaactggcttcagcagagcgcagataccaaatactgttcttctagtgtagccgtagttaggccaccacttcaagaactctgtagcaccgcctacatacctcgctctgctaatcctgttaccagtggctgctgccagtggcgataagtcgtgtcttaccgggttggactcaagacgatagttaccggataaggcgcagcggtcgggctgaacggggggttcgtgcacacagcccagcttggagcgaacgacctacaccgaactgagatacctacagcgtgagctatgagaaagcgccacgcttcccgaagggagaaaggcggacaggtatccggtaagcggcagggtcggaacaggagagcgcacgagggagcttccagggggaaacgcctggtatctttatagtcctgtcgggtttcgccacctctgacttgagcgtcgatttttgtgatgctcgtcaggggggcggagcctatggaaaaacgccagcaacgcggcctttttacggttcctggccttttgctggccttttgctcacatgttctttcctgcgttatcccctgattctgtggataaccgtattaccgcctttgagtgagctgataccgctcgccgcagccgaacgttgtttaattctgtgagcgtatggcaaacg

SEQ ID NO: 111 - DNA, 4517 bp, Artificial Sequence
  SEL-CSF-2 vector
agcgcccaatacgcaaaccgcctctccccgcgcgttggccgattcattaatgcagctggcacgacaggtttcccgactggaaagcgggcagtgagcgcaacgcaattaatgtgagttagctcactcattaggcaccccaggctttacactttatgcttccggctcgtatgttgtgtggaattgtgagcggataacaatttcacacaggaaacagctatgaccatgattacgccaagcttggtaccgagctctccagacattgttgaattagatcgataaaaattaattaattacccaattcgcccttgggtcatttttggactggttttttgcattcaaaggggatatcagtcagaaaggttttaaggctgtctatgaaatccgcataggtggtaacttgtgtttcacagtccgtttccggagttggggggcagtatgtctggtagtagctggctgtcatgttcaaggcgcccttgagtttggtgaaattgccccgtagaccctgctcgaatatcttcaggcgggtctgcacacatgttagcttcttgaaggagaactcgttagagacgacttctacctcttcattcaatgtgacaggcatgtcatccaggaggttcagggcttctttgatggcctctacatgcttccaaggccgggtgacagtgatgggtgagcgggtgggtgctgagaggctgtagaccacaatgcccaggaaaagtaaattctgcagccacatgtcgacttcgagcttatttatattccaaaaaaaaaaaataaaatttcaatttttaagctttcactaattccaaaccgagctcggatccttctgtgagcgtatggcagatggtgccaccgtagtgtactagtaacggccgccagtgtgctggaattctgcagatatccatcacactggcggccgctcgagcatgcatctagagggcccaattcgccctatagtgagtcgtattacaattcactggccgtcgttttacaacgtcgtgactgggaaaaccctggcgttacccaacttaatcgccttgcagcacatccccctttcgccagctggcgtaatagcgaagaggcccgcaccgatcgcccttcccaacagttgcgcagcctgaatggcgaatggacgcgccctgtagcggcgcattaagcgcggcgggtgtggtggttacgcgcagcgtgaccgctacacttgccagcgccctagcgcccgctcctttcgctttcttcccttcctttctcgccacgttcgccggctttccccgtcaagctctaaatcgggggctccctttagggttccgatttagtgctttacggcacctcgaccccaaaaaacttgattagggtgatggttcacgtagtgggccatcgccctgatagacggtttttcgccctttgacgttggagtccacgttctttaatagtggactcttgttccaaactggaacaacactcaaccctatctcggtctattcttttgatttataagggattttgccgatttcggcctattggttaaaaaatgagctgatttaacaaaaatttaacgcgaattttaacaaaattcagggcgcaagggctgctaaaggaagcggaacacgtagaaagccagtccgcagaaacggtgctgaccccggatgaatgtcagctactgggctatctggacaagggaaaacgcaagcgcaaagagaaagcaggtagcttgcagtgggcttacatggcgatagctagactgggcggttttatggacagcaagcgaaccggaattgccagctggggcgccctctggtaaggttgggaagccctgcaaagtaaactggatggctttcttgccgccaaggatctgatggcgcaggggatcaagatctgatcaagagacaggatgaggatcgtttcgcatgattgaacaagatggattgcacgcaggttctccggccgcttgggtggagaggctattcggctatgactgggcacaacagacaatcggctgctctgatgccgccgtgttccggctgtcagcgcaggggcgcccggttctttttgtcaagaccgacctgtccggtgccctgaatgaactgcaggacgaggcagcgcggctatcgtggctggccacgacgggcgttccttgcgcagctgtgctcgacgttgtcactgaagcgggaagggactggctgctattgggcgaagtgccggggcaggatctcctgtcatcccaccttgctcctgccgagaaagtatccatcatggctgatgcaatgcggcggctgcatacgcttgatccggctacctgcccattcgaccaccaagcgaaacatcgcatcgagcgagcacgtactcggatggaagccggtcttgtcgatcaggatgatctggacgaagagcatcaggggctcgcgccagccgaactgttcgccaggctcaaggcgcgcatgcccgacggcgaggatctcgtcgtgacccatggcgatgcctgcttgccgaatatcatggtggaaaatggccgcttttctggattcatcgactgtggccggctgggtgtggcggaccgctatcaggacatagcgttggctacccgtgatattgctgaagagcttggcggcgaatgggctgaccgcttcctcgtgctttacggtatcgccgctcccgattcgcagcgcatcgccttctatcgccttcttgacgagttcttctgaattgaaaaaggaagagtatgagtattcaacatttccgtgtcgcccttattcccttttttgcggcattttgccttcctgtttttgctcacccagaaacgctggtgaaagtaaaagatgctgaagatcagttgggtgcacgagtgggttacatcgaactggatctcaacagcggtaagatccttgagagttttcgccccgaagaacgttttccaatgatgagcacttttaaagttctgctatgtggcgcggtattatcccgtattgacgccgggcaagagcaactcggtcgccgcatacactattctcagaatgacttggttgagtactcaccagtcacagaaaagcatcttacggatggcatgacagtaagagaattatgcagtgctgccataaccatgagtgataacactgcggccaacttacttctgacaacgatcggaggaccgaaggagctaaccgcttttttgcacaacatgggggatcatgtaactcgccttgatcgttgggaaccggagctgaatgaagccataccaaacgacgagcgtgacaccacgatgcctgtagcaatggcaacaacgttgcgcaaactattaactggcgaactacttactctagcttcccggcaacaattaatagactggatggaggcggataaagttgcaggaccacttctgcgctcggcccttccggctggctggtttattgctgataaatctggagccggtgagcgtgggtctcgcggtatcattgcagcactggggccagatggtaagccctcccgtatcgtagttatctacacgacggggagtcaggcaactatggatgaacgaaatagacagatcgctgagataggtgcctcactgattaagcattggtaactgtcagaccaagtttactcatatatactttagattgatttaaaacttcatttttaatttaaaaggatctaggtgaagatcctttttgataatctcatgaccaaaatcccttaacgtgagttttcgttccactgagcgtcagaccccgtagaaaagatcaaaggatcttcttgagatcctttttttctgcgcgtaatctgctgcttgcaaacaaaaaaaccaccgctaccagcggtggtttgtttgccggatcaagagctaccaactctttttccgaaggtaactggcttcagcagagcgcagataccaaatactgttcttctagtgtagccgtagttaggccaccacttcaagaactctgtagcaccgcctacatacctcgctctgctaatcctgttaccagtggctgctgccagtggcgataagtcgtgtcttaccgggttggactcaagacgatagttaccggataaggcgcagcggtcgggctgaacggggggttcgtgcacacagcccagcttggagcgaacgacctacaccgaactgagatacctacagcgtgagctatgagaaagcgccacgcttcccgaagggagaaaggcggacaggtatccggtaagcggcagggtcggaacaggagagcgcacgagggagcttccagggggaaacgcctggtatctttatagtcctgtcgggtttcgccacctctgacttgagcgtcgatttttgtgatgctcgtcaggggggcggagcctatggaaaaacgccagcaacgcggcctttttacggttcctggccttttgctggccttttgctcacatgttctttcctgcgttatcccctgattctgtggataaccgtattaccgcctttgagtgagctgataccgctcgccgcagccgaacgaccgagcgcagcgagtcagtgagcgaggaagcggaag

SEQ ID NO: 112 - DNA, 6027 bp, Artificial Sequence
  TK-SEL-CSF-2 vector
agcgcccaatacgcaaaccgcctctccccgcgcgttggccgattcattaatgcagctggcacgacaggtttcccgactggaaagcgggcagtgagcgcaacgcaattaatgtgagttagctcactcattaggcaccccaggctttacactttatgcttccggctcgtatgttgtgtggaattgtgagcggataacaatttcacacaggaaacagctatgaccatgattacgccaagctttgttacagatggaagggtcaaacttaataaaggatatttgttcgactttgtgattagtttgatgcgattcaaaaaagaatcctctctagctaccaccgcaatagatcctgttagatacatagatcctcgtcgtgatatcgcattttctaacgtgatggatatattaaagtcgaataaagtgaacaataattaattctttattgtcatcatgaacggcggacatattcagttgataatcggccccatgttttcaggtaaaagtacagaattaattagacgagttagacgttatcaaatagctcaatataaatgcgtgactataaaatattctaacgataatagatacggaacgggactatggacgcatgataagaataattttgaagcattggaagcaactaaactatgtgatgtcttggaatcaattacagatttctccgtgataggtatcgatgaaggacagttctttccagacattgtttaattctgtgagcgtatggcaaacggtaccgagctcggtttggaattagtgaaagcttaaaaattgaaattttattttttttttttggaatataaaataagctcgaaagtcgacatgtggctgcagaatttacttttcctgggcattgtggtctacagcctctcagcacccacccgctcacccatcactgtcacccggccttggaagcatgtagaggccatcaaagaagccctgaacctcctggatgacatgcctgtcacattgaatgaagaggtagaagtcgtctctaacgagttctccttcaagaagctaacatgtgtgcagacccgcctgaagatattcgagcagggtctacggggcaatttcaccaaactcaagggcgccttgaacatgacagccagctactaccagacatactgccccccaactccggaaacggactgtgaaacacaagttaccacctatgcggatttcatagacagccttaaaacctttctgactgatatcccctttgaatgcaaaaaaccagtccaaaaatgacccaagggcgaattgggtaattaattaatttttatcgatctaattcaacaatgtctggagagctcggatccttctgtgagcgtatggcaaacgaaggaaaaatagttatagtagccgcactcgatgggacatttcaacgtaaaccgtttaataatattttgaatcttattccattatctgaaatggtggtaaaactaactgctgtgtgtatgaaatgctttaaggaggcttccttttctaaacgattgggtgaggaaaccgagatagagataataggaggtaatgatatgtatcaatcggtgtgtagaaagtgttacgtcggctcataatattatattttttatctaaaaaactaaaaataaacattgattaaattttaatataatacttaaaaatggatgttgtgtcgttagataaaccgtttatgtattttgaggaaattgataatgagttagattacgaaccagaaagtgcaaatgaggtcgcaaaaaaactgccgtatcaaggacagttaaaactattactaggagaattattttttcttagtaagttacagcgacacggtatattagatggtgccaccgtagtgtactagttaacggccgccagtgtgctggaattctagaaaagtagaaaatatattctaatttattgcacgggatgagcgaaaaatacatcgtcacctgggacatgttgcagatccatgcacgtaaactcgcaagccgactgatgccttctgaacaatggaaaggcattattgccgtaagccgtggcggtctggtaccgggtgcgttactggcgcgtgaactgggtattcgtcatgtcgataccgtttgtatttccagctacgatcacgacaaccagcgcgagcttaaagtgctgaaacgcgcagaaggcgatggcgaaggcttcatcgttattgatgacctggtggataccggtggtactgcggttgcgattcgtgaaatgtatccaaaagcgcactttgtcaccatcttcgcaaaaccggctggtcgtccgctggttgatgactatgttgttgatatcccgcaagatacctggattgaacagccgtgggatatgggcgtcgtattcgtcccgccaatctccggtcgctaaggatcagcttggcgtaatcaagccgaattctgcagatatccatcacactggcggccgctcgagcatgcatctagagggcccaattcgccctatagtgagtcgtattacaattcactggccgtcgttttacaacgtcgtgactgggaaaaccctggcgttacccaacttaatcgccttgcagcacatccccctttcgccagctggcgtaatagcgaagaggcccgcaccgatcgcccttcccaacagttgcgcagcctgaatggcgaatggacgcgccctgtagcggcgcattaagcgcggcgggtgtggtggttacgcgcagcgtgaccgctacacttgccagcgccctagcgcccgctcctttcgctttcttcccttcctttctcgccacgttcgccggctttccccgtcaagctctaaatcgggggctccctttagggttccgatttagtgctttacggcacctcgaccccaaaaaacttgattagggtgatggttcacgtagtgggccatcgccctgatagacggtttttcgccctttgacgttggagtccacgttctttaatagtggactcttgttccaaactggaacaacactcaaccctatctcggtctattcttttgatttataagggattttgccgatttcggcctattggttaaaaaatgagctgatttaacaaaaatttaacgcgaattttaacaaaattcagggcgcaagggctgctaaaggaagcggaacacgtagaaagccagtccgcagaaacggtgctgaccccggatgaatgtcagctactgggctatctggacaagggaaaacgcaagcgcaaagagaaagcaggtagcttgcagtgggcttacatggcgatagctagactgggcggttttatggacagcaagcgaaccggaattgccagctggggcgccctctggtaaggttgggaagccctgcaaagtaaactggatggctttcttgccgccaaggatctgatggcgcaggggatcaagatctgatcaagagacaggatgaggatcgtttcgcatgattgaacaagatggattgcacgcaggttctccggccgcttgggtggagaggctattcggctatgactgggcacaacagacaatcggctgctctgatgccgccgtgttccggctgtcagcgcaggggcgcccggttctttttgtcaagaccgacctgtccggtgccctgaatgaactgcaggacgaggcagcgcggctatcgtggctggccacgacgggcgttccttgcgcagctgtgctcgacgttgtcactgaagcgggaagggactggctgctattgggcgaagtgccggggcaggatctcctgtcatcccaccttgctcctgccgagaaagtatccatcatggctgatgcaatgcggcggctgcatacgcttgatccggctacctgcccattcgaccaccaagcgaaacatcgcatcgagcgagcacgtactcggatggaagccggtcttgtcgatcaggatgatctggacgaagagcatcaggggctcgcgccagccgaactgttcgccaggctcaaggcgcgcatgcccgacggcgaggatctcgtcgtgacccatggcgatgcctgcttgccgaatatcatggtggaaaatggccgcttttctggattcatcgactgtggccggctgggtgtggcggaccgctatcaggacatagcgttggctacccgtgatattgctgaagagcttggcggcgaatgggctgaccgcttcctcgtgctttacggtatcgccgctcccgattcgcagcgcatcgccttctatcgccttcttgacgagttcttctgaattgaaaaaggaagagtatgagtattcaacatttccgtgtcgcccttattcccttttttgcggcattttgccttcctgtttttgctcacccagaaacgctggtgaaagtaaaagatgctgaagatcagttgggtgcacgagtgggttacatcgaactggatctcaacagcggtaagatccttgagagttttcgccccgaagaacgttttccaatgatgagcacttttaaagttctgctatgtggcgcggtattatcccgtattgacgccgggcaagagcaactcggtcgccgcatacactattctcagaatgacttggttgagtactcaccagtcacagaaaagcatcttacggatggcatgacagtaagagaattatgcagtgctgccataaccatgagtgataacactgcggccaacttacttctgacaacgatcggaggaccgaaggagctaaccgcttttttgcacaacatgggggatcatgtaactcgccttgatcgttgggaaccggagctgaatgaagccataccaaacgacgagcgtgacaccacgatgcctgtagcaatggcaacaacgttgcgcaaactattaactggcgaactacttactctagcttcccggcaacaattaatagactggatggaggcggataaagttgcaggaccacttctgcgctcggcccttccggctggctggtttattgctgataaatctggagccggtgagcgtgggtctcgcggtatcattgcagcactggggccagatggtaagccctcccgtatcgtagttatctacacgacggggagtcaggcaactatggatgaacgaaatagacagatcgctgagataggtgcctcactgattaagcattggtaactgtcagaccaagtttactcatatatactttagattgatttaaaacttcatttttaatttaaaaggatctaggtgaagatcctttttgataatctcatgaccaaaatcccttaacgtgagttttcgttccactgagcgtcagaccccgtagaaaagatcaaaggatcttcttgagatcctttttttctgcgcgtaatctgctgcttgcaaacaaaaaaaccaccgctaccagcggtggtttgtttgccggatcaagagctaccaactctttttccgaaggtaactggcttcagcagagcgcagataccaaatactgttcttctagtgtagccgtagttaggccaccacttcaagaactctgtagcaccgcctacatacctcgctctgctaatcctgttaccagtggctgctgccagtggcgataagtcgtgtcttaccgggttggactcaagacgatagttaccggataaggcgcagcggtcgggctgaacggggggttcgtgcacacagcccagcttggagcgaacgacctacaccgaactgagatacctacagcgtgagctatgagaaagcgccacgcttcccgaagggagaaaggcggacaggtatccggtaagcggcagggtcggaacaggagagcgcacgagggagcttccagggggaaacgcctggtatctttatagtcctgtcgggtttcgccacctctgacttgagcgtcgatttttgtgatgctcgtcaggggggcggagcctatggaaaaacgccagcaacgcggcctttttacggttcctggccttttgctggccttttgctcacatgttctttcctgcgttatcccctgattctgtggataaccgtattaccgcctttgagtgagctgataccgctcgccgcagccgaacgttgtttaattctgtgagcgtatggcaaacg

SEQ ID NO: 113 - DNA, 4480 bp, Artificial Sequence
  SL-CSF-3 vector
agcgcccaatacgcaaaccgcctctccccgcgcgttggccgattcattaatgcagctggcacgacaggtttcccgactggaaagcgggcagtgagcgcaacgcaattaatgtgagttagctcactcattaggcaccccaggctttacactttatgcttccggctcgtatgttgtgtggaattgtgagcggataacaatttcacacaggaaacagctatgaccatgattacgccaagcttggtaccgagctctccagacattgttgaattagatcgataaaaattaattaattacccaattcgcccttgggtcatttttggactggttttttgcattcaaaggggatatcagtcagaaaggttttaaggctgtctatgaaatccgcataggtggtaacttgtgtttcacagtccgtttccggagttggggggcagtatgtctggtagtagctggctgtcatgttcaaggcgcccttgagtttggtgaaattgccccgtagaccctgctcgaatatcttcaggcgggtctgcacacatgttagcttcttgaaggagaactcgttagagacgacttctacctcttcattcaatgtgacaggcatgtcatccaggaggttcagggcttctttgatggcctctacatgcttccaaggccgggtgacagtgatgggtgagcgggtgggtgctgagaggctgtagaccacaatgcccaggaaaagtaaattctgcagccacatgtcgacttatttatatgccaaaaaaaaaaaaaaaaaaaagagctcggatccttctgtgagcgtatggcagatggtgccaccgtagtgtactagtaacggccgccagtgtgctggaattctgcagatatccatcacactggcggccgctcgagcatgcatctagagggcccaattcgccctatagtgagtcgtattacaattcactggccgtcgttttacaacgtcgtgactgggaaaaccctggcgttacccaacttaatcgccttgcagcacatccccctttcgccagctggcgtaatagcgaagaggcccgcaccgatcgcccttcccaacagttgcgcagcctgaatggcgaatggacgcgccctgtagcggcgcattaagcgcggcgggtgtggtggttacgcgcagcgtgaccgctacacttgccagcgccctagcgcccgctcctttcgctttcttcccttcctttctcgccacgttcgccggctttccccgtcaagctctaaatcgggggctccctttagggttccgatttagtgctttacggcacctcgaccccaaaaaacttgattagggtgatggttcacgtagtgggccatcgccctgatagacggtttttcgccctttgacgttggagtccacgttctttaatagtggactcttgttccaaactggaacaacactcaaccctatctcggtctattcttttgatttataagggattttgccgatttcggcctattggttaaaaaatgagctgatttaacaaaaatttaacgcgaattttaacaaaattcagggcgcaagggctgctaaaggaagcggaacacgtagaaagccagtccgcagaaacggtgctgaccccggatgaatgtcagctactgggctatctggacaagggaaaacgcaagcgcaaagagaaagcaggtagcttgcagtgggcttacatggcgatagctagactgggcggttttatggacagcaagcgaaccggaattgccagctggggcgccctctggtaaggttgggaagccctgcaaagtaaactggatggctttcttgccgccaaggatctgatggcgcaggggatcaagatctgatcaagagacaggatgaggatcgtttcgcatgattgaacaagatggattgcacgcaggttctccggccgcttgggtggagaggctattcggctatgactgggcacaacagacaatcggctgctctgatgccgccgtgttccggctgtcagcgcaggggcgcccggttctttttgtcaagaccgacctgtccggtgccctgaatgaactgcaggacgaggcagcgcggctatcgtggctggccacgacgggcgttccttgcgcagctgtgctcgacgttgtcactgaagcgggaagggactggctgctattgggcgaagtgccggggcaggatctcctgtcatcccaccttgctcctgccgagaaagtatccatcatggctgatgcaatgcggcggctgcatacgcttgatccggctacctgcccattcgaccaccaagcgaaacatcgcatcgagcgagcacgtactcggatggaagccggtcttgtcgatcaggatgatctggacgaagagcatcaggggctcgcgccagccgaactgttcgccaggctcaaggcgcgcatgcccgacggcgaggatctcgtcgtgacccatggcgatgcctgcttgccgaatatcatggtggaaaatggccgcttttctggattcatcgactgtggccggctgggtgtggcggaccgctatcaggacatagcgttggctacccgtgatattgctgaagagcttggcggcgaatgggctgaccgcttcctcgtgctttacggtatcgccgctcccgattcgcagcgcatcgccttctatcgccttcttgacgagttcttctgaattgaaaaaggaagagtatgagtattcaacatttccgtgtcgcccttattcccttttttgcggcattttgccttcctgtttttgctcacccagaaacgctggtgaaagtaaaagatgctgaagatcagttgggtgcacgagtgggttacatcgaactggatctcaacagcggtaagatccttgagagttttcgccccgaagaacgttttccaatgatgagcacttttaaagttctgctatgtggcgcggtattatcccgtattgacgccgggcaagagcaactcggtcgccgcatacactattctcagaatgacttggttgagtactcaccagtcacagaaaagcatcttacggatggcatgacagtaagagaattatgcagtgctgccataaccatgagtgataacactgcggccaacttacttctgacaacgatcggaggaccgaaggagctaaccgcttttttgcacaacatgggggatcatgtaactcgccttgatcgttgggaaccggagctgaatgaagccataccaaacgacgagcgtgacaccacgatgcctgtagcaatggcaacaacgttgcgcaaactattaactggcgaactacttactctagcttcccggcaacaattaatagactggatggaggcggataaagttgcaggaccacttctgcgctcggcccttccggctggctggtttattgctgataaatctggagccggtgagcgtgggtctcgcggtatcattgcagcactggggccagatggtaagccctcccgtatcgtagttatctacacgacggggagtcaggcaactatggatgaacgaaatagacagatcgctgagataggtgcctcactgattaagcattggtaactgtcagaccaagtttactcatatatactttagattgatttaaaacttcatttttaatttaaaaggatctaggtgaagatcctttttgataatctcatgaccaaaatcccttaacgtgagttttcgttccactgagcgtcagaccccgtagaaaagatcaaaggatcttcttgagatcctttttttctgcgcgtaatctgctgcttgcaaacaaaaaaaccaccgctaccagcggtggtttgtttgccggatcaagagctaccaactctttttccgaaggtaactggcttcagcagagcgcagataccaaatactgttcttctagtgtagccgtagttaggccaccacttcaagaactctgtagcaccgcctacatacctcgctctgctaatcctgttaccagtggctgctgccagtggcgataagtcgtgtcttaccgggttggactcaagacgatagttaccggataaggcgcagcggtcgggctgaacggggggttcgtgcacacagcccagcttggagcgaacgacctacaccgaactgagatacctacagcgtgagctatgagaaagcgccacgcttcccgaagggagaaaggcggacaggtatccggtaagcggcagggtcggaacaggagagcgcacgagggagcttccagggggaaacgcctggtatctttatagtcctgtcgggtttcgccacctctgacttgagcgtcgatttttgtgatgctcgtcaggggggcggagcctatggaaaaacgccagcaacgcggcctttttacggttcctggccttttgctggccttttgctcacatgttctttcctgcgttatcccctgattctgtggataaccgtattaccgcctttgagtgagctgataccgctcgccgcagccgaacgaccgagcgcagcgagtcagtgagcgaggaagcggaag

SEQ ID NO: 114 - DNA, 5988 bp, Artificial Sequence
  TK-SL-CSF-3 vector
agcgcccaatacgcaaaccgcctctccccgcgcgttggccgattcattaatgcagctggcacgacaggtttcccgactggaaagcgggcagtgagcgcaacgcaattaatgtgagttagctcactcattaggcaccccaggctttacactttatgcttccggctcgtatgttgtgtggaattgtgagcggataacaatttcacacaggaaacagctatgaccatgattacgccaagctttgttacagatggaagggtcaaacttaataaaggatatttgttcgactttgtgattagtttgatgcgattcaaaaaagaatcctctctagctaccaccgcaatagatcctgttagatacatagatcctcgtcgtgatatcgcattttctaacgtgatggatatattaaagtcgaataaagtgaacaataattaattctttattgtcatcatgaacggcggacatattcagttgataatcggccccatgttttcaggtaaaagtacagaattaattagacgagttagacgttatcaaatagctcaatataaatgcgtgactataaaatattctaacgataatagatacggaacgggactatggacgcatgataagaataattttgaagcattggaagcaactaaactatgtgatgtcttggaatcaattacagatttctccgtgataggtatcgatgaaggacagttctttccagacattgtttaattctgtgagcgtatggcaaacggtaccgagctcttttttttttttttttttttggcatataaataagtcgacatgtggctgcagaatttacttttcctgggcattgtggtctacagcctctcagcacccacccgctcacccatcactgtcacccggccttggaagcatgtagaggccatcaaagaagccctgaacctcctggatgacatgcctgtcacattgaatgaagaggtagaagtcgtctctaacgagttctccttcaagaagctaacatgtgtgcagacccgcctgaagatattcgagcagggtctacggggcaatttcaccaaactcaagggcgccttgaacatgacagccagctactaccagacatactgccccccaactccggaaacggactgtgaaacacaagttaccacctatgcggatttcatagacagccttaaaacctttctgactgatatcccctttgaatgcaaaaaaccagtccaaaaatgacccaagggcgaattgggtaattaattaatttttatcgatctaattcaacaatgtctggagagctcggatccttctgtgagcgtatggcaaacgaaggaaaaatagttatagtagccgcactcgatgggacatttcaacgtaaaccgtttaataatattttgaatcttattccattatctgaaatggtggtaaaactaactgctgtgtgtatgaaatgctttaaggaggcttccttttctaaacgattgggtgaggaaaccgagatagagataataggaggtaatgatatgtatcaatcggtgtgtagaaagtgttacgtcggctcataatattatattttttatctaaaaaactaaaaataaacattgattaaattttaatataatacttaaaaatggatgttgtgtcgttagataaaccgtttatgtattttgaggaaattgataatgagttagattacgaaccagaaagtgcaaatgaggtcgcaaaaaaactgccgtatcaaggacagttaaaactattactaggagaattattttttcttagtaagttacagcgacacggtatattagatggtgccaccgtagtgtactagttaacggccgccagtgtgctggaattctagaaaagtagaaaatatattctaatttattgcacgggatgagcgaaaaatacatcgtcacctgggacatgttgcagatccatgcacgtaaactcgcaagccgactgatgccttctgaacaatggaaaggcattattgccgtaagccgtggcggtctggtaccgggtgcgttactggcgcgtgaactgggtattcgtcatgtcgataccgtttgtatttccagctacgatcacgacaaccagcgcgagcttaaagtgctgaaacgcgcagaaggcgatggcgaaggcttcatcgttattgatgacctggtggataccggtggtactgcggttgcgattcgtgaaatgtatccaaaagcgcactttgtcaccatcttcgcaaaaccggctggtcgtccgctggttgatgactatgttgttgatatcccgcaagatacctggattgaacagccgtgggatatgggcgtcgtattcgtcccgccaatctccggtcgctaaggatcagcttggcgtaatcaagccgaattctgcagatatccatcacactggcggccgctcgagcatgcatctagagggcccaattcgccctatagtgagtcgtattacaattcactggccgtcgttttacaacgtcgtgactgggaaaaccctggcgttacccaacttaatcgccttgcagcacatccccctttcgccagctggcgtaatagcgaagaggcccgcaccgatcgcccttcccaacagttgcgcagcctgaatggcgaatggacgcgccctgtagcggcgcattaagcgcggcgggtgtggtggttacgcgcagcgtgaccgctacacttgccagcgccctagcgcccgctcctttcgctttcttcccttcctttctcgccacgttcgccggctttccccgtcaagctctaaatcgggggctccctttagggttccgatttagtgctttacggcacctcgaccccaaaaaacttgattagggtgatggttcacgtagtgggccatcgccctgatagacggtttttcgccctttgacgttggagtccacgttctttaatagtggactcttgttccaaactggaacaacactcaaccctatctcggtctattcttttgatttataagggattttgccgatttcggcctattggttaaaaaatgagctgatttaacaaaaatttaacgcgaattttaacaaaattcagggcgcaagggctgctaaaggaagcggaacacgtagaaagccagtccgcagaaacggtgctgaccccggatgaatgtcagctactgggctatctggacaagggaaaacgcaagcgcaaagagaaagcaggtagcttgcagtgggcttacatggcgatagctagactgggcggttttatggacagcaagcgaaccggaattgccagctggggcgccctctggtaaggttgggaagccctgcaaagtaaactggatggctttcttgccgccaaggatctgatggcgcaggggatcaagatctgatcaagagacaggatgaggatcgtttcgcatgattgaacaagatggattgcacgcaggttctccggccgcttgggtggagaggctattcggctatgactgggcacaacagacaatcggctgctctgatgccgccgtgttccggctgtcagcgcaggggcgcccggttctttttgtcaagaccgacctgtccggtgccctgaatgaactgcaggacgaggcagcgcggctatcgtggctggccacgacgggcgttccttgcgcagctgtgctcgacgttgtcactgaagcgggaagggactggctgctattgggcgaagtgccggggcaggatctcctgtcatcccaccttgctcctgccgagaaagtatccatcatggctgatgcaatgcggcggctgcatacgcttgatccggctacctgcccattcgaccaccaagcgaaacatcgcatcgagcgagcacgtactcggatggaagccggtcttgtcgatcaggatgatctggacgaagagcatcaggggctcgcgccagccgaactgttcgccaggctcaaggcgcgcatgcccgacggcgaggatctcgtcgtgacccatggcgatgcctgcttgccgaatatcatggtggaaaatggccgcttttctggattcatcgactgtggccggctgggtgtggcggaccgctatcaggacatagcgttggctacccgtgatattgctgaagagcttggcggcgaatgggctgaccgcttcctcgtgctttacggtatcgccgctcccgattcgcagcgcatcgccttctatcgccttcttgacgagttcttctgaattgaaaaaggaagagtatgagtattcaacatttccgtgtcgcccttattcccttttttgcggcattttgccttcctgtttttgctcacccagaaacgctggtgaaagtaaaagatgctgaagatcagttgggtgcacgagtgggttacatcgaactggatctcaacagcggtaagatccttgagagttttcgccccgaagaacgttttccaatgatgagcacttttaaagttctgctatgtggcgcggtattatcccgtattgacgccgggcaagagcaactcggtcgccgcatacactattctcagaatgacttggttgagtactcaccagtcacagaaaagcatcttacggatggcatgacagtaagagaattatgcagtgctgccataaccatgagtgataacactgcggccaacttacttctgacaacgatcggaggaccgaaggagctaaccgcttttttgcacaacatgggggatcatgtaactcgccttgatcgttgggaaccggagctgaatgaagccataccaaacgacgagcgtgacaccacgatgcctgtagcaatggcaacaacgttgcgcaaactattaactggcgaactacttactctagcttcccggcaacaattaatagactggatggaggcggataaagttgcaggaccacttctgcgctcggcccttccggctggctggtttattgctgataaatctggagccggtgagcgtgggtctcgcggtatcattgcagcactggggccagatggtaagccctcccgtatcgtagttatctacacgacggggagtcaggcaactatggatgaacgaaatagacagatcgctgagataggtgcctcactgattaagcattggtaactgtcagaccaagtttactcatatatactttagattgatttaaaacttcatttttaatttaaaaggatctaggtgaagatcctttttgataatctcatgaccaaaatcccttaacgtgagttttcgttccactgagcgtcagaccccgtagaaaagatcaaaggatcttcttgagatcctttttttctgcgcgtaatctgctgcttgcaaacaaaaaaaccaccgctaccagcggtggtttgtttgccggatcaagagctaccaactctttttccgaaggtaactggcttcagcagagcgcagataccaaatactgttcttctagtgtagccgtagttaggccaccacttcaagaactctgtagcaccgcctacatacctcgctctgctaatcctgttaccagtggctgctgccagtggcgataagtcgtgtcttaccgggttggactcaagacgatagttaccggataaggcgcagcggtcgggctgaacggggggttcgtgcacacagcccagcttggagcgaacgacctacaccgaactgagatacctacagcgtgagctatgagaaagcgccacgcttcccgaagggagaaaggcggacaggtatccggtaagcggcagggtcggaacaggagagcgcacgagggagcttccagggggaaacgcctggtatctttatagtcctgtcgggtttcgccacctctgacttgagcgtcgatttttgtgatgctcgtcaggggggcggagcctatggaaaaacgccagcaacgcggcctttttacggttcctggccttttgctggccttttgctcacatgttctttcctgcgttatcccctgattctgtggataaccgtattaccgcctttgagtgagctgataccgctcgccgcagccgaacgttgtttaattctgtgagcgtatggcaaacg

SEQ ID NO: 115 - DNA, 28 bp, Artificial Sequence
  hu-tTF-RGD forward primer (SalI)
gtcgacccaccatggagacccctgcctg

SEQ ID NO: 116 - DNA, 53 bp, Artificial Sequence
  hu-tTF-RGD reverse primer (PacI)
ttaattaatattatggagaatcacctcttcctctgaattcccctttctcctgg

SEQ ID NO: 117 - DNA, 74 bp, Artificial Sequence
  ruc-gfp Psel forward primer
atcaagcttaaaaattgaaattttattttttttttttggaatataaatgacttcgaaagtttatgatccagaac

SEQ ID NO: 118 - DNA, 20 bp, Artificial Sequence
  ruc-gfp reverse primer
tcacttgtacagctcgtcca

SEQ ID NO: 119 - DNA, 6022 bp, Artificial Sequence
  FSE-hNET vector
gacgtctaagaaaccattattatcatgacattaacctataaaaataggcgtatcacgaggccctttcgtctcgcgcgtttcggtgatgacggtgaaaacctctgacacatgcagctcccggagacggtcacagcttgtctgtaagcggatgccgggagcagacaagcccgtcagggcgcgtcagcgggtgttggcgggtgtcggggctggcttaactatgcggcatcagagcagattgtactgagagtgcaccatatgtagaagaattgataaatatgaaaccttttaagaatatgaataaaataacaattaatcaaaaggataattgtatattagcaaatcgatgctttgttaaaatagatactcctagatacataccatcgacatccattagcagttctaatatcatcagaatacggaatcatgattttacattatctgaattattgtattcaccgtttcattttcaacagcctcagtttcaatatctccttcctgggtttgtattaacgtgtattgataaagtttcgaaacagcaaaaagaatgtaaatattgtatctctaatcgtggagatgatgatagtttaagcattaatctatttattccgactattaacaagtctatatatattattatcggtttacggatgaaaaatttttggaagcctaaattcgaaatagaataatgtttttatattatacatgtgctaaaagaatgatcgatacagtttaagtgaaagctagagaggggtttttaaatggtcatcggtttagtcatattcgtgtctgtaagcttggtaccgagctctccagacattgttgaattagatcgataaaaattaattaattacccatctcagatggccagccagtgttgcaactggaactgtctgatgtccctctgagccaccaggtggtgctcgttctctggcgtgatgccataggccagtctctcccaaagagagccctgcgtgctgaggaacttatagatgacgtagatgggcaccaggaccatggaggacagggcgatgccccaccccacccagttggcccagggcgggaagatgtagtcgtcgtaggtgagtggcttgaagttgatgatgctgaccacaaccacgaacaggaggaaggcaggactgacgaacttccagcacagtctccagtatagacccggcctgaaccccatcatctgctggatgtcgttgctgaacctgtccactccataaaaccaggaaactccgatggcttccatgaggacagcaaaaaggatggaggtgcccgcagcaaaggtgtccaggagggtcaagacgtaaattccacccttggttatgcagaacagggcgagaaggaaagtgctgaaggtgacgccaaatgtgaagagtttccggtgtcgcttcaggacctggaagtcatctgccaggcccgtgatgacagcctccatgcctcccattgagctgtcaaggcccagcgccaggagcatgacgaaaaacacaacagcccagaatgtagatccagacagggtagaaatggcctctggatacaggatgaacactaggccagctccttctgtggccacatcctcaatgttgaccttgtgttcatgggccatgtaaccaaggatggagaagatggcgaacccagagacgaagctggtgatacagttgatgctgctggtcagcagggcatccctgtaacagttgttgtcaaatttgttgtaactggcaaatgcaatcaatactccaaatccagcccccaaggaaaaaaatatctgagttgcggcatcaatccataccgtggcctctttcaagcggtagaagtcgatgtgcaggtaggcattgatgccattggaggctccgggcagcgtgacgccatggaccaggagcacgaacagcacgaagtaaggcagcgtggctgtgatccacaccacctttcctgatgtcttcacccctttccagaggctaaaatacaagacgatgacgacgaccatcagacagagcaagagctgccactggggcaggccgatgtcatgaatcccgctgctctcgtgaaggtgcaggacaccacgctcataaaactcggctgccggcgtgaacttgtacttggagtacttggtgtggttgccaagcacggagccattgaggagcttggggtcggtacagttggggctgttccaggtgtggccacagtcggtccagggcaggttgagggtgaaggaggagaagaggtagtagagtgaccaggcgatgatgacgttgtagtagaagccaacgtacagggcgatcaggatgacagcatagccaacgcctttgaagaatgggcagattttccaaacggtggcagccccctcccggttgtactgtcccagagccagctccatgtagaacaggggcatccccgcgatgataaggaacagtgtgtacgggatcaagaaggcaccgccgccgttcttgtagcagaggtaggggaagcgccacacgttggccaggtccactgcgaagccgactacggacagcaggaagtcgatcttcttgccccaggtctcccggggctgcgcgtcgccgtcgcggggcgccagcaggcactggacgccgttgcgctccttcaccaccagcagctccgcagttttgcgcgcccgaaggggctgctctggacccgtgtccgccccgttgttctcgggctgcacctgcgggttcatccgcgccagaagcatggtggcgtcgacttcgagcaaaaaaagacgctagtttttcaatttttgagctcggatcctgcggccgccatcgtcggtgtgttgtctaacgtattggacatgtttatgtacgtagaagaaaataatgaagaggatgctagaatcaaggaggagcaagaactactgttgctatattaatacataattgaaaatctaccaacttaaatacaccgcctataaatttacaatgaaacacagattgtattctgaaggattgagtattagtaatgatttaaactcgataatcggtcaacaatctacaatggatacggatatagaaatagacgaagatgacatcatggaacttcttaatatattgactgagttaggttgtgatgtcgactttgatgaaaattttagcgatatagccgatgatattctagaatcgttgatagaacaggatgtataagtttttatgttaactaaatgtggccatttgcatcggtacctgcgggagcaaaatgtaggctggtagaaacactaccagaaaatatggattttagatccgatcatttaacaacatttgaatgttttaacgaaattatcactctagctaagaaatatatatacatagcatctttttgttgtaatcctctgaattctagaaaagtagaaaatatattctaatttattgcacgggatgagcgaaaaatacatcgtcacctgggacatgttgcagatccatgcacgtaaactcgcaagccgactgatgccttctgaacaatggaaaggcattattgccgtaagccgtggcggtctggtaccgggtgcgttactggcgcgtgaactgggtattcgtcatgtcgataccgtttgtatttccagctacgatcacgacaaccagcgcgagcttaaagtgctgaaacgcgcagaaggcgatggcgaaggcttcatcgttattgatgacctggtggataccggtggtactgcggttgcgattcgtgaaatgtatccaaaagcgcactttgtcaccatcttcgcaaaaccggctggtcgtccgctggttgatgactatgttgttgatatcccgcaagatacctggattgaacagccgtgggatatgggcgtcgtattcgtcccgccaatctccggtcgctaaggatcagcttggcgtaatcatggtcatagctgtttcctgtgtgaaattgttatccgctcacaattccacacaacatacgagccggaagcataaagtgtaaagcctggggtgcctaatgagtgagctaactcacattaattgcgttgcgctcactgcccgctttccagtcgggaaacctgtcgtgccagctgcattaatgaatcggccaacgcgcggggagaggcggtttgcgtattgggcgctcttccgcttcctcgctcactgactcgctgcgctcggtcgttcggctgcggcgagcggtatcagctcactcaaaggcggtaatacggttatccacagaatcaggggataacgcaggaaagaacatgtgagcaaaaggccagcaaaaggccaggaaccgtaaaaaggccgcgttgctggcgtttttccataggctccgcccccctgacgagcatcacaaaaatcgacgctcaagtcagaggtggcgaaacccgacaggactataaagataccaggcgtttccccctggaagctccctcgtgcgctctcctgttccgaccctgccgcttaccggatacctgtccgcctttctcccttcgggaagcgtggcgctttctcatagctcacgctgtaggtatctcagttcggtgtaggtcgttcgctccaagctgggctgtgtgcacgaaccccccgttcagcccgaccgctgcgccttatccggtaactatcgtcttgagtccaacccggtaagacacgacttatcgccactggcagcagccactggtaacaggattagcagagcgaggtatgtaggcggtgctacagagttcttgaagtggtggcctaactacggctacactagaaggacagtatttggtatctgcgctctgctgaagccagttaccttcggaaaaagagttggtagctcttgatccggcaaacaaaccaccgctggtagcggtggtttttttgtttgcaagcagcagattacgcgcagaaaaaaaggatctcaagaagatcctttgatcttttctacggggtctgacgctcagtggaacgaaaactcacgttaagggattttggtcatgagattatcaaaaaggatcttcacctagatccttttaaattaaaaatgaagttttaaatcaatctaaagtatatatgagtaaacttggtctgacagttaccaatgcttaatcagtgaggcacctatctcagcgatctgtctatttcgttcatccatagttgcctgactccccgtcgtgtagataactacgatacgggagggcttaccatctggccccagtgctgcaatgataccgcgagacccacgctcaccggctccagatttatcagcaataaaccagccagccggaagggccgagcgcagaagtggtcctgcaactttatccgcctccatccagtctattaattgttgccgggaagctagagtaagtagttcgccagttaatagtttgcgcaacgttgttgccattgctacaggcatcgtggtgtcacgctcgtcgtttggtatggcttcattcagctccggttcccaacgatcaaggcgagttacatgatcccccatgttgtgcaaaaaagcggttagctccttcggtcctccgatcgttgtcagaagtaagttggccgcagtgttatcactcatggttatggcagcactgcataattctcttactgtcatgccatccgtaagatgcttttctgtgactggtgagtactcaaccaagtcattctgagaatagtgtatgcggcgaccgagttgctcttgcccggcgtcaatacgggataataccgcgccacatagcagaactttaaaagtgctcatcattggaaaacgttcttcggggcgaaaactctcaaggatcttaccgctgttgagatccagttcgatgtaacccactcgtgcacccaactgatcttcagcatcttttactttcaccagcgtttctgggtgagcaaaaacaggaaggcaaaatgccgcaaaaaagggaataagggcgacacggaaatgttgaatactcatactcttcctttttcaatattattgaagcatttatcagggttattgtctcatgagcggatacatatttgaatgtatttagaaaaataaacaaataggggttccgcgcacatttccccgaaaagtgccacct

SEQ ID NO: 120 - DNA, 32 bp, Artificial Sequence
  hNET5 primer
gtcgacgccaccatgcttctggcgcggatgaa

SEQ ID NO: 121 - DNA, 26 bp, Artificial Sequence
  hNET3 primer
gatatctcagatggccagccagtgtt

SEQ ID NO: 122 - DNA, 3519 bp, Artificial Sequence; identical to SEQ ID NO: 40
  pCR-Blunt II-TOPO vector

SEQ ID NO: 123 - DNA, 4061 bp, Artificial Sequence; identical to SEQ ID NO: 36
  pCR-SE1 vector

SEQ ID NO: 124 - DNA, 4059 bp, Artificial Sequence; identical to SEQ ID NO: 11
  pNCVVf14.5lT vector

SEQ ID NO: 125 - DNA, 7398 bp, Artificial Sequence
  TK-SE-hNET3 vector
agcgcccaatacgcaaaccgcctctccccgcgcgttggccgattcattaatgcagctggcacgacaggtttcccgactggaaagcgggcagtgagcgcaacgcaattaatgtgagttagctcactcattaggcaccccaggctttacactttatgcttccggctcgtatgttgtgtggaattgtgagcggataacaatttcacacaggaaacagctatgaccatgattacgccaagctttgttacagatggaagggtcaaacttaataaaggatatttgttcgactttgtgattagtttgatgcgattcaaaaaagaatcctctctagctaccaccgcaatagatcctgttagatacatagatcctcgtcgtgatatcgcattttctaacgtgatggatatattaaagtcgaataaagtgaacaataattaattctttattgtcatcatgaacggcggacatattcagttgataatcggccccatgttttcaggtaaaagtacagaattaattagacgagttagacgttatcaaatagctcaatataaatgcgtgactataaaatattctaacgataatagatacggaacgggactatggacgcatgataagaataattttgaagcattggaagcaactaaactatgtgatgtcttggaatcaattacagatttctccgtgataggtatcgatgaaggacagttctttccagacattgtttaattctgtgagcgtatggcaaacggtaccgagctcaaaaattgaaaaactagcgtctttttttgctcgaagtcgacatgcttctggcgcggatgaacccgcaggtgcagcccgagaacaacggggcggacacgggtccagagcagccccttcgggcgcgcaaaactgcggagctgctggtggtgaaggagcgcaacggcgtccagtgcctgctggcgccccgcgacggcgacgcgcagccccgggagacctggggcaagaagatcgacttcctgctgtccgtagtcggcttcgcagtggacctggccaacgtgtggcgcttcccctacctctgctacaagaacggcggcggtgccttcttgatcccgtacacactgttccttatcatcgcggggatgcccctgttctacatggagctggctctgggacagtacaaccgggagggggctgccaccgtttggaaaatctgcccattcttcaaaggcgttggctatgctgtcatcctgatcgccctgtacgttggcttctactacaacgtcatcatcgcctggtcactctactacctcttctcctccttcaccctcaacctgccctggaccgactgtggccacacctggaacagccccaactgtaccgaccccaagctcctcaatggctccgtgcttggcaaccacaccaagtactccaagtacaagttcacgccggcagccgagttttatgagcgtggtgtcctgcaccttcacgagagcagcgggattcatgacatcggcctgccccagtggcagctcttgctctgtctgatggtcgtcgtcatcgtcttgtattttagcctctggaaaggggtgaagacatcaggaaaggtggtgtggatcacagccacgctgccttacttcgtgctgttcgtgctcctggtccatggcgtcacgctgcccggagcctccaatggcatcaatgcctacctgcacatcgacttctaccgcttgaaagaggccacggtatggattgatgccgcaactcagatatttttttccttgggggctggatttggagtattgattgcatttgccagttacaacaaatttgacaacaactgttacagggatgccctgctgaccagcagcatcaactgtatcaccagcttcgtctctgggttcgccatcttctccatccttggttacatggcccatgaacacaaggtcaacattgaggatgtggccacagaaggagctggcctagtgttcatcctgtatccagaggccatttctaccctgtctggatctacattctgggctgttgtgtttttcgtcatgctcctggcgctgggccttgacagctcaatgggaggcatggaggctgtcatcacgggcctggcagatgacttccaggtcctgaagcgacaccggaaactcttcacatttggcgtcaccttcagcactttccttctcgccctgttctgcataaccaagggtggaatttacgtcttgaccctcctggacacctttgctgcgggcacctccatcctttttgctgtcctcatggaagccatcggagtttcctggttttatggagtggacaggttcagcaacgacatccagcagatgatggggttcaggccgggtctatactggagactgtgctggaagttcgtcagtcctgccttcctcctgttcgtggttgtggtcagcatcatcaacttcaagccactcacctacgacgactacatcttcccgccctgggccaactgggtggggtggggcatcgccctgtcctccatggtcctggtgcccatctacgtcatctataagttcctcagcacgcagggctctctttgggagagactggcctatggcatcacgccagagaacgagcaccacctggtggctcagagggacatcagacagttccagttgcaacactggctggccatctgattaattaatttttatcgatctaattcaacaatgtctggagagctcggatccttctgtgagcgtatggcaaacgaaggaaaaatagttatagtagccgcactcgatgggacatttcaacgtaaaccgtttaataatattttgaatcttattccattatctgaaatggtggtaaaactaactgctgtgtgtatgaaatgctttaaggaggcttccttttctaaacgattgggtgaggaaaccgagatagagataataggaggtaatgatatgtatcaatcggtgtgtagaaagtgttacgtcggctcataatattatattttttatctaaaaaactaaaaataaacattgattaaattttaatataatacttaaaaatggatgttgtgtcgttagataaaccgtttatgtattttgaggaaattgataatgagttagattacgaaccagaaagtgcaaatgaggtcgcaaaaaaactgccgtatcaaggacagttaaaactattactaggagaattattttttcttagtaagttacagcgacacggtatattagatggtgccaccgtagtgtactagttaacggccgccagtgtgctggaattctagaaaagtagaaaatatattctaatttattgcacgggatgagcgaaaaatacatcgtcacctgggacatgttgcagatccatgcacgtaaactcgcaagccgactgatgccttctgaacaatggaaaggcattattgccgtaagccgtggcggtctggtaccgggtgcgttactggcgcgtgaactgggtattcgtcatgtcgataccgtttgtatttccagctacgatcacgacaaccagcgcgagcttaaagtgctgaaacgcgcagaaggcgatggcgaaggcttcatcgttattgatgacctggtggataccggtggtactgcggttgcgattcgtgaaatgtatccaaaagcgcactttgtcaccatcttcgcaaaaccggctggtcgtccgctggttgatgactatgttgttgatatcccgcaagatacctggattgaacagccgtgggatatgggcgtcgtattcgtcccgccaatctccggtcgctaaggatcagcttggcgtaatcaagccgaattctgcagatatccatcacactggcggccgctcgagcatgcatctagagggcccaattcgccctatagtgagtcgtattacaattcactggccgtcgttttacaacgtcgtgactgggaaaaccctggcgttacccaacttaatcgccttgcagcacatccccctttcgccagctggcgtaatagcgaagaggcccgcaccgatcgcccttcccaacagttgcgcagcctgaatggcgaatggacgcgccctgtagcggcgcattaagcgcggcgggtgtggtggttacgcgcagcgtgaccgctacacttgccagcgccctagcgcccgctcctttcgctttcttcccttcctttctcgccacgttcgccggctttccccgtcaagctctaaatcgggggctccctttagggttccgatttagtgctttacggcacctcgaccccaaaaaacttgattagggtgatggttcacgtagtgggccatcgccctgatagacggtttttcgccctttgacgttggagtccacgttctttaatagtggactcttgttccaaactggaacaacactcaaccctatctcggtctattcttttgatttataagggattttgccgatttcggcctattggttaaaaaatgagctgatttaacaaaaatttaacgcgaattttaacaaaattcagggcgcaagggctgctaaaggaagcggaacacgtagaaagccagtccgcagaaacggtgctgaccccggatgaatgtcagctactgggctatctggacaagggaaaacgcaagcgcaaagagaaagcaggtagcttgcagtgggcttacatggcgatagctagactgggcggttttatggacagcaagcgaaccggaattgccagctggggcgccctctggtaaggttgggaagccctgcaaagtaaactggatggctttcttgccgccaaggatctgatggcgcaggggatcaagatctgatcaagagacaggatgaggatcgtttcgcatgattgaacaagatggattgcacgcaggttctccggccgcttgggtggagaggctattcggctatgactgggcacaacagacaatcggctgctctgatgccgccgtgttccggctgtcagcgcaggggcgcccggttctttttgtcaagaccgacctgtccggtgccctgaatgaactgcaggacgaggcagcgcggctatcgtggctggccacgacgggcgttccttgcgcagctgtgctcgacgttgtcactgaagcgggaagggactggctgctattgggcgaagtgccggggcaggatctcctgtcatcccaccttgctcctgccgagaaagtatccatcatggctgatgcaatgcggcggctgcatacgcttgatccggctacctgcccattcgaccaccaagcgaaacatcgcatcgagcgagcacgtactcggatggaagccggtcttgtcgatcaggatgatctggacgaagagcatcaggggctcgcgccagccgaactgttcgccaggctcaaggcgcgcatgcccgacggcgaggatctcgtcgtgacccatggcgatgcctgcttgccgaatatcatggtggaaaatggccgcttttctggattcatcgactgtggccggctgggtgtggcggaccgctatcaggacatagcgttggctacccgtgatattgctgaagagcttggcggcgaatgggctgaccgcttcctcgtgctttacggtatcgccgctcccgattcgcagcgcatcgccttctatcgccttcttgacgagttcttctgaattgaaaaaggaagagtatgagtattcaacatttccgtgtcgcccttattcccttttttgcggcattttgccttcctgtttttgctcacccagaaacgctggtgaaagtaaaagatgctgaagatcagttgggtgcacgagtgggttacatcgaactggatctcaacagcggtaagatccttgagagttttcgccccgaagaacgttttccaatgatgagcacttttaaagttctgctatgtggcgcggtattatcccgtattgacgccgggcaagagcaactcggtcgccgcatacactattctcagaatgacttggttgagtactcaccagtcacagaaaagcatcttacggatggcatgacagtaagagaattatgcagtgctgccataaccatgagtgataacactgcggccaacttacttctgacaacgatcggaggaccgaaggagctaaccgcttttttgcacaacatgggggatcatgtaactcgccttgatcgttgggaaccggagctgaatgaagccataccaaacgacgagcgtgacaccacgatgcctgtagcaatggcaacaacgttgcgcaaactattaactggcgaactacttactctagcttcccggcaacaattaatagactggatggaggcggataaagttgcaggaccacttctgcgctcggcccttccggctggctggtttattgctgataaatctggagccggtgagcgtgggtctcgcggtatcattgcagcactggggccagatggtaagccctcccgtatcgtagttatctacacgacggggagtcaggcaactatggatgaacgaaatagacagatcgctgagataggtgcctcactgattaagcattggtaactgtcagaccaagtttactcatatatactttagattgatttaaaacttcatttttaatttaaaaggatctaggtgaagatcctttttgataatctcatgaccaaaatcccttaacgtgagttttcgttccactgagcgtcagaccccgtagaaaagatcaaaggatcttcttgagatcctttttttctgcgcgtaatctgctgcttgcaaacaaaaaaaccaccgctaccagcggtggtttgtttgccggatcaagagctaccaactctttttccgaaggtaactggcttcagcagagcgcagataccaaatactgttcttctagtgtagccgtagttaggccaccacttcaagaactctgtagcaccgcctacatacctcgctctgctaatcctgttaccagtggctgctgccagtggcgataagtcgtgtcttaccgggttggactcaagacgatagttaccggataaggcgcagcggtcgggctgaacggggggttcgtgcacacagcccagcttggagcgaacgacctacaccgaactgagatacctacagcgtgagctatgagaaagcgccacgcttcccgaagggagaaaggcggacaggtatccggtaagcggcagggtcggaacaggagagcgcacgagggagcttccagggggaaacgcctggtatctttatagtcctgtcgggtttcgccacctctgacttgagcgtcgatttttgtgatgctcgtcaggggggcggagcctatggaaaaacgccagcaacgcggcctttttacggttcctggccttttgctggccttttgctcacatgttctttcctgcgttatcccctgattctgtggataaccgtattaccgcctttgagtgagctgataccgctcgccgcagccgaacgttgtttaattctgtgagcgtatggcaaacg

SEQ ID NO: 126 - DNA, 5834 bp, Artificial Sequence
  TK-SE-mIP10-1 vector
agcgcccaatacgcaaaccgcctctccccgcgcgttggccgattcattaatgcagctggcacgacaggtttcccgactggaaagcgggcagtgagcgcaacgcaattaatgtgagttagctcactcattaggcaccccaggctttacactttatgcttccggctcgtatgttgtgtggaattgtgagcggataacaatttcacacaggaaacagctatgaccatgattacgccaagctttgttacagatggaagggtcaaacttaataaaggatatttgttcgactttgtgattagtttgatgcgattcaaaaaagaatcctctctagctaccaccgcaatagatcctgttagatacatagatcctcgtcgtgatatcgcattttctaacgtgatggatatattaaagtcgaataaagtgaacaataattaattctttattgtcatcatgaacggcggacatattcagttgataatcggccccatgttttcaggtaaaagtacagaattaattagacgagttagacgttatcaaatagctcaatataaatgcgtgactataaaatattctaacgataatagatacggaacgggactatggacgcatgataagaataattttgaagcattggaagcaactaaactatgtgatgtcttggaatcaattacagatttctccgtgataggtatcgatgaaggacagttctttccagacattgtttaattctgtgagcgtatggcaaacggtaccgagctcaaaaattgaaaaactagcgtctttttttgctcgaagtcgacgccaccatgaacccaagtgctgccgtcattttctgcctcatcctgctgggtctgagtgggactcaagggatccctctcgcaaggacggtccgctgcaactgcatccatatcgatgacgggccagtgagaatgagggccatagggaagcttgaaatcatccctgcgagcctatcctgcccacgtgttgagatcattgccacgatgaaaaagaatgatgagcagagatgtctgaatccggaatctaagaccatcaagaatttaatgaaagcgtttagccaaaaaaggtctaattaattaatttttatcgatctaattcaacaatgtctggagagctcggatccttctgtgagcgtatggcaaacgaaggaaaaatagttatagtagccgcactcgatgggacatttcaacgtaaaccgtttaataatattttgaatcttattccattatctgaaatggtggtaaaactaactgctgtgtgtatgaaatgctttaaggaggcttccttttctaaacgattgggtgaggaaaccgagatagagataataggaggtaatgatatgtatcaatcggtgtgtagaaagtgttacgtcggctcataatattatattttttatctaaaaaactaaaaataaacattgattaaattttaatataatacttaaaaatggatgttgtgtcgttagataaaccgtttatgtattttgaggaaattgataatgagttagattacgaaccagaaagtgcaaatgaggtcgcaaaaaaactgccgtatcaaggacagttaaaactattactaggagaattattttttcttagtaagttacagcgacacggtatattagatggtgccaccgtagtgtactagttaacggccgccagtgtgctggaattctagaaaagtagaaaatatattctaatttattgcacgggatgagcgaaaaatacatcgtcacctgggacatgttgcagatccatgcacgtaaactcgcaagccgactgatgccttctgaacaatggaaaggcattattgccgtaagccgtggcggtctggtaccgggtgcgttactggcgcgtgaactgggtattcgtcatgtcgataccgtttgtatttccagctacgatcacgacaaccagcgcgagcttaaagtgctgaaacgcgcagaaggcgatggcgaaggcttcatcgttattgatgacctggtggataccggtggtactgcggttgcgattcgtgaaatgtatccaaaagcgcactttgtcaccatcttcgcaaaaccggctggtcgtccgctggttgatgactatgttgttgatatcccgcaagatacctggattgaacagccgtgggatatgggcgtcgtattcgtcccgccaatctccggtcgctaaggatcagcttggcgtaatcaagccgaattctgcagatatccatcacactggcggccgctcgagcatgcatctagagggcccaattcgccctatagtgagtcgtattacaattcactggccgtcgttttacaacgtcgtgactgggaaaaccctggcgttacccaacttaatcgccttgcagcacatccccctttcgccagctggcgtaatagcgaagaggcccgcaccgatcgcccttcccaacagttgcgcagcctgaatggcgaatggacgcgccctgtagcggcgcattaagcgcggcgggtgtggtggttacgcgcagcgtgaccgctacacttgccagcgccctagcgcccgctcctttcgctttcttcccttcctttctcgccacgttcgccggctttccccgtcaagctctaaatcgggggctccctttagggttccgatttagtgctttacggcacctcgaccccaaaaaacttgattagggtgatggttcacgtagtgggccatcgccctgatagacggtttttcgccctttgacgttggagtccacgttctttaatagtggactcttgttccaaactggaacaacactcaaccctatctcggtctattcttttgatttataagggattttgccgatttcggcctattggttaaaaaatgagctgatttaacaaaaatttaacgcgaattttaacaaaattcagggcgcaagggctgctaaaggaagcggaacacgtagaaagccagtccgcagaaacggtgctgaccccggatgaatgtcagctactgggctatctggacaagggaaaacgcaagcgcaaagagaaagcaggtagcttgcagtgggcttacatggcgatagctagactgggcggttttatggacagcaagcgaaccggaattgccagctggggcgccctctggtaaggttgggaagccctgcaaagtaaactggatggctttcttgccgccaaggatctgatggcgcaggggatcaagatctgatcaagagacaggatgaggatcgtttcgcatgattgaacaagatggattgcacgcaggttctccggccgcttgggtggagaggctattcggctatgactgggcacaacagacaatcggctgctctgatgccgccgtgttccggctgtcagcgcaggggcgcccggttctttttgtcaagaccgacctgtccggtgccctgaatgaactgcaggacgaggcagcgcggctatcgtggctggccacgacgggcgttccttgcgcagctgtgctcgacgttgtcactgaagcgggaagggactggctgctattgggcgaagtgccggggcaggatctcctgtcatcccaccttgctcctgccgagaaagtatccatcatggctgatgcaatgcggcggctgcatacgcttgatccggctacctgcccattcgaccaccaagcgaaacatcgcatcgagcgagcacgtactcggatggaagccggtcttgtcgatcaggatgatctggacgaagagcatcaggggctcgcgccagccgaactgttcgccaggctcaaggcgcgcatgcccgacggcgaggatctcgtcgtgacccatggcgatgcctgcttgccgaatatcatggtggaaaatggccgcttttctggattcatcgactgtggccggctgggtgtggcggaccgctatcaggacatagcgttggctacccgtgatattgctgaagagcttggcggcgaatgggctgaccgcttcctcgtgctttacggtatcgccgctcccgattcgcagcgcatcgccttctatcgccttcttgacgagttcttctgaattgaaaaaggaagagtatgagtattcaacatttccgtgtcgcccttattcccttttttgcggcattttgccttcctgtttttgctcacccagaaacgctggtgaaagtaaaagatgctgaagatcagttgggtgcacgagtgggttacatcgaactggatctcaacagcggtaagatccttgagagttttcgccccgaagaacgttttccaatgatgagcacttttaaagttctgctatgtggcgcggtattatcccgtattgacgccgggcaagagcaactcggtcgccgcatacactattctcagaatgacttggttgagtactcaccagtcacagaaaagcatcttacggatggcatgacagtaagagaattatgcagtgctgccataaccatgagtgataacactgcggccaacttacttctgacaacgatcggaggaccgaaggagctaaccgcttttttgcacaacatgggggatcatgtaactcgccttgatcgttgggaaccggagctgaatgaagccataccaaacgacgagcgtgacaccacgatgcctgtagcaatggcaacaacgttgcgcaaactattaactggcgaactacttactctagcttcccggcaacaattaatagactggatggaggcggataaagttgcaggaccacttctgcgctcggcccttccggctggctggtttattgctgataaatctggagccggtgagcgtgggtctcgcggtatcattgcagcactggggccagatggtaagccctcccgtatcgtagttatctacacgacggggagtcaggcaactatggatgaacgaaatagacagatcgctgagataggtgcctcactgattaagcattggtaactgtcagaccaagtttactcatatatactttagattgatttaaaacttcatttttaatttaaaaggatctaggtgaagatcctttttgataatctcatgaccaaaatcccttaacgtgagttttcgttccactgagcgtcagaccccgtagaaaagatcaaaggatcttcttgagatcctttttttctgcgcgtaatctgctgcttgcaaacaaaaaaaccaccgctaccagcggtggtttgtttgccggatcaagagctaccaactctttttccgaaggtaactggcttcagcagagcgcagataccaaatactgttcttctagtgtagccgtagttaggccaccacttcaagaactctgtagcaccgcctacatacctcgctctgctaatcctgttaccagtggctgctgccagtggcgataagtcgtgtcttaccgggttggactcaagacgatagttaccggataaggcgcagcggtcgggctgaacggggggttcgtgcacacagcccagcttggagcgaacgacctacaccgaactgagatacctacagcgtgagctatgagaaagcgccacgcttcccgaagggagaaaggcggacaggtatccggtaagcggcagggtcggaacaggagagcgcacgagggagcttccagggggaaacgcctggtatctttatagtcctgtcgggtttcgccacctctgacttgagcgtcgatttttgtgatgctcgtcaggggggcggagcctatggaaaaacgccagcaacgcggcctttttacggttcctggccttttgctggccttttgctcacatgttctttcctgcgttatcccctgattctgtggataaccgtattaccgcctttgagtgagctgataccgctcgccgcagccgaacgttgtttaattctgtgagcgtatggcaaacg

SEQ ID NO: 127 - DNA, 7396 bp, Artificial Sequence
  TK-SL-hNET3
agcgcccaatacgcaaaccgcctctccccgcgcgttggccgattcattaatgcagctggcacgacaggtttcccgactggaaagcgggcagtgagcgcaacgcaattaatgtgagttagctcactcattaggcaccccaggctttacactttatgcttccggctcgtatgttgtgtggaattgtgagcggataacaatttcacacaggaaacagctatgaccatgattacgccaagctttgttacagatggaagggtcaaacttaataaaggatatttgttcgactttgtgattagtttgatgcgattcaaaaaagaatcctctctagctaccaccgcaatagatcctgttagatacatagatcctcgtcgtgatatcgcattttctaacgtgatggatatattaaagtcgaataaagtgaacaataattaattctttattgtcatcatgaacggcggacatattcagttgataatcggccccatgttttcaggtaaaagtacagaattaattagacgagttagacgttatcaaatagctcaatataaatgcgtgactataaaatattctaacgataatagatacggaacgggactatggacgcatgataagaataattttgaagcattggaagcaactaaactatgtgatgtcttggaatcaattacagatttctccgtgataggtatcgatgaaggacagttctttccagacattgtttaattctgtgagcgtatggcaaacggtaccgagctcttttttttttttttttttttggcatataaataagtcgacatgcttctggcgcggatgaacccgcaggtgcagcccgagaacaacggggcggacacgggtccagagcagccccttcgggcgcgcaaaactgcggagctgctggtggtgaaggagcgcaacggcgtccagtgcctgctggcgccccgcgacggcgacgcgcagccccgggagacctggggcaagaagatcgacttcctgctgtccgtagtcggcttcgcagtggacctggccaacgtgtggcgcttcccctacctctgctacaagaacggcggcggtgccttcttgatcccgtacacactgttccttatcatcgcggggatgcccctgttctacatggagctggctctgggacagtacaaccgggagggggctgccaccgtttggaaaatctgcccattcttcaaaggcgttggctatgctgtcatcctgatcgccctgtacgttggcttctactacaacgtcatcatcgcctggtcactctactacctcttctcctccttcaccctcaacctgccctggaccgactgtggccacacctggaacagccccaactgtaccgaccccaagctcctcaatggctccgtgcttggcaaccacaccaagtactccaagtacaagttcacgccggcagccgagttttatgagcgtggtgtcctgcaccttcacgagagcagcgggattcatgacatcggcctgccccagtggcagctcttgctctgtctgatggtcgtcgtcatcgtcttgtattttagcctctggaaaggggtgaagacatcaggaaaggtggtgtggatcacagccacgctgccttacttcgtgctgttcgtgctcctggtccatggcgtcacgctgcccggagcctccaatggcatcaatgcctacctgcacatcgacttctaccgcttgaaagaggccacggtatggattgatgccgcaactcagatatttttttccttgggggctggatttggagtattgattgcatttgccagttacaacaaatttgacaacaactgttacagggatgccctgctgaccagcagcatcaactgtatcaccagcttcgtctctgggttcgccatcttctccatccttggttacatggcccatgaacacaaggtcaacattgaggatgtggccacagaaggagctggcctagtgttcatcctgtatccagaggccatttctaccctgtctggatctacattctgggctgttgtgtttttcgtcatgctcctggcgctgggccttgacagctcaatgggaggcatggaggctgtcatcacgggcctggcagatgacttccaggtcctgaagcgacaccggaaactcttcacatttggcgtcaccttcagcactttccttctcgccctgttctgcataaccaagggtggaatttacgtcttgaccctcctggacacctttgctgcgggcacctccatcctttttgctgtcctcatggaagccatcggagtttcctggttttatggagtggacaggttcagcaacgacatccagcagatgatggggttcaggccgggtctatactggagactgtgctggaagttcgtcagtcctgccttcctcctgttcgtggttgtggtcagcatcatcaacttcaagccactcacctacgacgactacatcttcccgccctgggccaactgggtggggtggggcatcgccctgtcctccatggtcctggtgcccatctacgtcatctataagttcctcagcacgcagggctctctttgggagagactggcctatggcatcacgccagagaacgagcaccacctggtggctcagagggacatcagacagttccagttgcaacactggctggccatctgattaattaatttttatcgatctaattcaacaatgtctggagagctcggatccttctgtgagcgtatggcaaacgaaggaaaaatagttatagtagccgcactcgatgggacatttcaacgtaaaccgtttaataatattttgaatcttattccattatctgaaatggtggtaaaactaactgctgtgtgtatgaaatgctttaaggaggcttccttttctaaacgattgggtgaggaaaccgagatagagataataggaggtaatgatatgtatcaatcggtgtgtagaaagtgttacgtcggctcataatattatattttttatctaaaaaactaaaaataaacattgattaaattttaatataatacttaaaaatggatgttgtgtcgttagataaaccgtttatgtattttgaggaaattgataatgagttagattacgaaccagaaagtgcaaatgaggtcgcaaaaaaactgccgtatcaaggacagttaaaactattactaggagaattattttttcttagtaagttacagcgacacggtatattagatggtgccaccgtagtgtactagttaacggccgccagtgtgctggaattctagaaaagtagaaaatatattctaatttattgcacgggatgagcgaaaaatacatcgtcacctgggacatgttgcagatccatgcacgtaaactcgcaagccgactgatgccttctgaacaatggaaaggcattattgccgtaagccgtggcggtctggtaccgggtgcgttactggcgcgtgaactgggtattcgtcatgtcgataccgtttgtatttccagctacgatcacgacaaccagcgcgagcttaaagtgctgaaacgcgcagaaggcgatggcgaaggcttcatcgttattgatgacctggtggataccggtggtactgcggttgcgattcgtgaaatgtatccaaaagcgcactttgtcaccatcttcgcaaaaccggctggtcgtccgctggttgatgactatgttgttgatatcccgcaagatacctggattgaacagccgtgggatatgggcgtcgtattcgtcccgccaatctccggtcgctaaggatcagcttggcgtaatcaagccgaattctgcagatatccatcacactggcggccgctcgagcatgcatctagagggcccaattcgccctatagtgagtcgtattacaattcactggccgtcgttttacaacgtcgtgactgggaaaaccctggcgttacccaacttaatcgccttgcagcacatccccctttcgccagctggcgtaatagcgaagaggcccgcaccgatcgcccttcccaacagttgcgcagcctgaatggcgaatggacgcgccctgtagcggcgcattaagcgcggcgggtgtggtggttacgcgcagcgtgaccgctacacttgccagcgccctagcgcccgctcctttcgctttcttcccttcctttctcgccacgttcgccggctttccccgtcaagctctaaatcgggggctccctttagggttccgatttagtgctttacggcacctcgaccccaaaaaacttgattagggtgatggttcacgtagtgggccatcgccctgatagacggtttttcgccctttgacgttggagtccacgttctttaatagtggactcttgttccaaactggaacaacactcaaccctatctcggtctattcttttgatttataagggattttgccgatttcggcctattggttaaaaaatgagctgatttaacaaaaatttaacgcgaattttaacaaaattcagggcgcaagggctgctaaaggaagcggaacacgtagaaagccagtccgcagaaacggtgctgaccccggatgaatgtcagctactgggctatctggacaagggaaaacgcaagcgcaaagagaaagcaggtagcttgcagtgggcttacatggcgatagctagactgggcggttttatggacagcaagcgaaccggaattgccagctggggcgccctctggtaaggttgggaagccctgcaaagtaaactggatggctttcttgccgccaaggatctgatggcgcaggggatcaagatctgatcaagagacaggatgaggatcgtttcgcatgattgaacaagatggattgcacgcaggttctccggccgcttgggtggagaggctattcggctatgactgggcacaacagacaatcggctgctctgatgccgccgtgttccggctgtcagcgcaggggcgcccggttctttttgtcaagaccgacctgtccggtgccctgaatgaactgcaggacgaggcagcgcggctatcgtggctggccacgacgggcgttccttgcgcagctgtgctcgacgttgtcactgaagcgggaagggactggctgctattgggcgaagtgccggggcaggatctcctgtcatcccaccttgctcctgccgagaaagtatccatcatggctgatgcaatgcggcggctgcatacgcttgatccggctacctgcccattcgaccaccaagcgaaacatcgcatcgagcgagcacgtactcggatggaagccggtcttgtcgatcaggatgatctggacgaagagcatcaggggctcgcgccagccgaactgttcgccaggctcaaggcgcgcatgcccgacggcgaggatctcgtcgtgacccatggcgatgcctgcttgccgaatatcatggtggaaaatggccgcttttctggattcatcgactgtggccggctgggtgtggcggaccgctatcaggacatagcgttggctacccgtgatattgctgaagagcttggcggcgaatgggctgaccgcttcctcgtgctttacggtatcgccgctcccgattcgcagcgcatcgccttctatcgccttcttgacgagttcttctgaattgaaaaaggaagagtatgagtattcaacatttccgtgtcgcccttattcccttttttgcggcattttgccttcctgtttttgctcacccagaaacgctggtgaaagtaaaagatgctgaagatcagttgggtgcacgagtgggttacatcgaactggatctcaacagcggtaagatccttgagagttttcgccccgaagaacgttttccaatgatgagcacttttaaagttctgctatgtggcgcggtattatcccgtattgacgccgggcaagagcaactcggtcgccgcatacactattctcagaatgacttggttgagtactcaccagtcacagaaaagcatcttacggatggcatgacagtaagagaattatgcagtgctgccataaccatgagtgataacactgcggccaacttacttctgacaacgatcggaggaccgaaggagctaaccgcttttttgcacaacatgggggatcatgtaactcgccttgatcgttgggaaccggagctgaatgaagccataccaaacgacgagcgtgacaccacgatgcctgtagcaatggcaacaacgttgcgcaaactattaactggcgaactacttactctagcttcccggcaacaattaatagactggatggaggcggataaagttgcaggaccacttctgcgctcggcccttccggctggctggtttattgctgataaatctggagccggtgagcgtgggtctcgcggtatcattgcagcactggggccagatggtaagccctcccgtatcgtagttatctacacgacggggagtcaggcaactatggatgaacgaaatagacagatcgctgagataggtgcctcactgattaagcattggtaactgtcagaccaagtttactcatatatactttagattgatttaaaacttcatttttaatttaaaaggatctaggtgaagatcctttttgataatctcatgaccaaaatcccttaacgtgagttttcgttccactgagcgtcagaccccgtagaaaagatcaaaggatcttcttgagatcctttttttctgcgcgtaatctgctgcttgcaaacaaaaaaaccaccgctaccagcggtggtttgtttgccggatcaagagctaccaactctttttccgaaggtaactggcttcagcagagcgcagataccaaatactgttcttctagtgtagccgtagttaggccaccacttcaagaactctgtagcaccgcctacatacctcgctctgctaatcctgttaccagtggctgctgccagtggcgataagtcgtgtcttaccgggttggactcaagacgatagttaccggataaggcgcagcggtcgggctgaacggggggttcgtgcacacagcccagcttggagcgaacgacctacaccgaactgagatacctacagcgtgagctatgagaaagcgccacgcttcccgaagggagaaaggcggacaggtatccggtaagcggcagggtcggaacaggagagcgcacgagggagcttccagggggaaacgcctggtatctttatagtcctgtcgggtttcgccacctctgacttgagcgtcgatttttgtgatgctcgtcaggggggcggagcctatggaaaaacgccagcaacgcggcctttttacggttcctggccttttgctggccttttgctcacatgttctttcctgcgttatcccctgattctgtggataaccgtattaccgcctttgagtgagctgataccgctcgccgcagccgaacgttgtttaattctgtgagcgtatggcaaacg

SEQ ID NO: 128 - DNA, 5832 bp, Artificial Sequence
  TK-SL-mIP10-1 vector
agcgcccaatacgcaaaccgcctctccccgcgcgttggccgattcattaatgcagctggcacgacaggtttcccgactggaaagcgggcagtgagcgcaacgcaattaatgtgagttagctcactcattaggcaccccaggctttacactttatgcttccggctcgtatgttgtgtggaattgtgagcggataacaatttcacacaggaaacagctatgaccatgattacgccaagctttgttacagatggaagggtcaaacttaataaaggatatttgttcgactttgtgattagtttgatgcgattcaaaaaagaatcctctctagctaccaccgcaatagatcctgttagatacatagatcctcgtcgtgatatcgcattttctaacgtgatggatatattaaagtcgaataaagtgaacaataattaattctttattgtcatcatgaacggcggacatattcagttgataatcggccccatgttttcaggtaaaagtacagaattaattagacgagttagacgttatcaaatagctcaatataaatgcgtgactataaaatattctaacgataatagatacggaacgggactatggacgcatgataagaataattttgaagcattggaagcaactaaactatgtgatgtcttggaatcaattacagatttctccgtgataggtatcgatgaaggacagttctttccagacattgtttaattctgtgagcgtatggcaaacggtaccgagctcttttttttttttttttttttggcatataaataagtcgacgccaccatgaacccaagtgctgccgtcattttctgcctcatcctgctgggtctgagtgggactcaagggatccctctcgcaaggacggtccgctgcaactgcatccatatcgatgacgggccagtgagaatgagggccatagggaagcttgaaatcatccctgcgagcctatcctgcccacgtgttgagatcattgccacgatgaaaaagaatgatgagcagagatgtctgaatccggaatctaagaccatcaagaatttaatgaaagcgtttagccaaaaaaggtctaattaattaatttttatcgatctaattcaacaatgtctggagagctcggatccttctgtgagcgtatggcaaacgaaggaaaaatagttatagtagccgcactcgatgggacatttcaacgtaaaccgtttaataatattttgaatcttattccattatctgaaatggtggtaaaactaactgctgtgtgtatgaaatgctttaaggaggcttccttttctaaacgattgggtgaggaaaccgagatagagataataggaggtaatgatatgtatcaatcggtgtgtagaaagtgttacgtcggctcataatattatattttttatctaaaaaactaaaaataaacattgattaaattttaatataatacttaaaaatggatgttgtgtcgttagataaaccgtttatgtattttgaggaaattgataatgagttagattacgaaccagaaagtgcaaatgaggtcgcaaaaaaactgccgtatcaaggacagttaaaactattactaggagaattattttttcttagtaagttacagcgacacggtatattagatggtgccaccgtagtgtactagttaacggccgccagtgtgctggaattctagaaaagtagaaaatatattctaatttattgcacgggatgagcgaaaaatacatcgtcacctgggacatgttgcagatccatgcacgtaaactcgcaagccgactgatgccttctgaacaatggaaaggcattattgccgtaagccgtggcggtctggtaccgggtgcgttactggcgcgtgaactgggtattcgtcatgtcgataccgtttgtatttccagctacgatcacgacaaccagcgcgagcttaaagtgctgaaacgcgcagaaggcgatggcgaaggcttcatcgttattgatgacctggtggataccggtggtactgcggttgcgattcgtgaaatgtatccaaaagcgcactttgtcaccatcttcgcaaaaccggctggtcgtccgctggttgatgactatgttgttgatatcccgcaagatacctggattgaacagccgtgggatatgggcgtcgtattcgtcccgccaatctccggtcgctaaggatcagcttggcgtaatcaagccgaattctgcagatatccatcacactggcggccgctcgagcatgcatctagagggcccaattcgccctatagtgagtcgtattacaattcactggccgtcgttttacaacgtcgtgactgggaaaaccctggcgttacccaacttaatcgccttgcagcacatccccctttcgccagctggcgtaatagcgaagaggcccgcaccgatcgcccttcccaacagttgcgcagcctgaatggcgaatggacgcgccctgtagcggcgcattaagcgcggcgggtgtggtggttacgcgcagcgtgaccgctacacttgccagcgccctagcgcccgctcctttcgctttcttcccttcctttctcgccacgttcgccggctttccccgtcaagctctaaatcgggggctccctttagggttccgatttagtgctttacggcacctcgaccccaaaaaacttgattagggtgatggttcacgtagtgggccatcgccctgatagacggtttttcgccctttgacgttggagtccacgttctttaatagtggactcttgttccaaactggaacaacactcaaccctatctcggtctattcttttgatttataagggattttgccgatttcggcctattggttaaaaaatgagctgatttaacaaaaatttaacgcgaattttaacaaaattcagggcgcaagggctgctaaaggaagcggaacacgtagaaagccagtccgcagaaacggtgctgaccccggatgaatgtcagctactgggctatctggacaagggaaaacgcaagcgcaaagagaaagcaggtagcttgcagtgggcttacatggcgatagctagactgggcggttttatggacagcaagcgaaccggaattgccagctggggcgccctctggtaaggttgggaagccctgcaaagtaaactggatggctttcttgccgccaaggatctgatggcgcaggggatcaagatctgatcaagagacaggatgaggatcgtttcgcatgattgaacaagatggattgcacgcaggttctccggccgcttgggtggagaggctattcggctatgactgggcacaacagacaatcggctgctctgatgccgccgtgttccggctgtcagcgcaggggcgcccggttctttttgtcaagaccgacctgtccggtgccctgaatgaactgcaggacgaggcagcgcggctatcgtggctggccacgacgggcgttccttgcgcagctgtgctcgacgttgtcactgaagcgggaagggactggctgctattgggcgaagtgccggggcaggatctcctgtcatcccaccttgctcctgccgagaaagtatccatcatggctgatgcaatgcggcggctgcatacgcttgatccggctacctgcccattcgaccaccaagcgaaacatcgcatcgagcgagcacgtactcggatggaagccggtcttgtcgatcaggatgatctggacgaagagcatcaggggctcgcgccagccgaactgttcgccaggctcaaggcgcgcatgcccgacggcgaggatctcgtcgtgacccatggcgatgcctgcttgccgaatatcatggtggaaaatggccgcttttctggattcatcgactgtggccggctgggtgtggcggaccgctatcaggacatagcgttggctacccgtgatattgctgaagagcttggcggcgaatgggctgaccgcttcctcgtgctttacggtatcgccgctcccgattcgcagcgcatcgccttctatcgccttcttgacgagttcttctgaattgaaaaaggaagagtatgagtattcaacatttccgtgtcgcccttattcccttttttgcggcattttgccttcctgtttttgctcacccagaaacgctggtgaaagtaaaagatgctgaagatcagttgggtgcacgagtgggttacatcgaactggatctcaacagcggtaagatccttgagagttttcgccccgaagaacgttttccaatgatgagcacttttaaagttctgctatgtggcgcggtattatcccgtattgacgccgggcaagagcaactcggtcgccgcatacactattctcagaatgacttggttgagtactcaccagtcacagaaaagcatcttacggatggcatgacagtaagagaattatgcagtgctgccataaccatgagtgataacactgcggccaacttacttctgacaacgatcggaggaccgaaggagctaaccgcttttttgcacaacatgggggatcatgtaactcgccttgatcgttgggaaccggagctgaatgaagccataccaaacgacgagcgtgacaccacgatgcctgtagcaatggcaacaacgttgcgcaaactattaactggcgaactacttactctagcttcccggcaacaattaatagactggatggaggcggataaagttgcaggaccacttctgcgctcggcccttccggctggctggtttattgctgataaatctggagccggtgagcgtgggtctcgcggtatcattgcagcactggggccagatggtaagccctcccgtatcgtagttatctacacgacggggagtcaggcaactatggatgaacgaaatagacagatcgctgagataggtgcctcactgattaagcattggtaactgtcagaccaagtttactcatatatactttagattgatttaaaacttcatttttaatttaaaaggatctaggtgaagatcctttttgataatctcatgaccaaaatcccttaacgtgagttttcgttccactgagcgtcagaccccgtagaaaagatcaaaggatcttcttgagatcctttttttctgcgcgtaatctgctgcttgcaaacaaaaaaaccaccgctaccagcggtggtttgtttgccggatcaagagctaccaactctttttccgaaggtaactggcttcagcagagcgcagataccaaatactgttcttctagtgtagccgtagttaggccaccacttcaagaactctgtagcaccgcctacatacctcgctctgctaatcctgttaccagtggctgctgccagtggcgataagtcgtgtcttaccgggttggactcaagacgatagttaccggataaggcgcagcggtcgggctgaacggggggttcgtgcacacagcccagcttggagcgaacgacctacaccgaactgagatacctacagcgtgagctatgagaaagcgccacgcttcccgaagggagaaaggcggacaggtatccggtaagcggcagggtcggaacaggagagcgcacgagggagcttccagggggaaacgcctggtatctttatagtcctgtcgggtttcgccacctctgacttgagcgtcgatttttgtgatgctcgtcaggggggcggagcctatggaaaaacgccagcaacgcggcctttttacggttcctggccttttgctggccttttgctcacatgttctttcctgcgttatcccctgattctgtggataaccgtattaccgcctttgagtgagctgataccgctcgccgcagccgaacgttgtttaattctgtgagcgtatggcaaacg

SEQ ID NO: 129 - DNA, 5767 bp, Artificial Sequence
  HA-SE-hNET vector
gacgtctaagaaaccattattatcatgacattaacctataaaaataggcgtatcacgaggccctttcgtctcgcgcgtttcggtgatgacggtgaaaacctctgacacatgcagctcccggagacggtcacagcttgtctgtaagcggatgccgggagcagacaagcccgtcagggcgcgtcagcgggtgttggcgggtgtcggggctggcttaactatgcggcatcagagcagattgtactgagagtgcaccatatgacacgattaccaatacttttgttactaatatcattagtatacgctacaccttttcctcagacatctaaaaaaataggtgatgatgcaactctatcatgtaatcgaaataatacaaatgactacgttgttatgagtgcttggtataaggagcccaattccattattcttttagctgctaaaagcgacgtcttgtattttgataattataccaaggataaaatatcttacgactctccatacgatgatctagttacaactatcacaattaaatcattgactgctagagatgccggtacttatgtatgtgcattctttatgacatcgcctacaaatgacactgataaagtagattatgaagaatactccacagagttgattgtaaatacagatagtgaatcgactatagacataatactatctggatctacacattcaccggaaactagttctgagaaacctgattatatagataattctaattgctcgtcggtattcgaaatctaagctcaaaaattgaaaaactagcgtctttttttgctcgaagtcgacgccaccatgcttctggcgcggatgaacccgcaggtgcagcccgagaacaacggggcggacacgggtccagagcagccccttcgggcgcgcaaaactgcggagctgctggtggtgaaggagcgcaacggcgtccagtgcctgctggcgccccgcgacggcgacgcgcagccccgggagacctggggcaagaagatcgacttcctgctgtccgtagtcggcttcgcagtggacctggccaacgtgtggcgcttcccctacctctgctacaagaacggcggcggtgccttcttgatcccgtacacactgttccttatcatcgcggggatgcccctgttctacatggagctggctctgggacagtacaaccgggagggggctgccaccgtttggaaaatctgcccattcttcaaaggcgttggctatgctgtcatcctgatcgccctgtacgttggcttctactacaacgtcatcatcgcctggtcactctactacctcttctcctccttcaccctcaacctgccctggaccgactgtggccacacctggaacagccccaactgtaccgaccccaagctcctcaatggctccgtgcttggcaaccacaccaagtactccaagtacaagttcacgccggcagccgagttttatgagcgtggtgtcctgcaccttcacgagagcagcgggattcatgacatcggcctgccccagtggcagctcttgctctgtctgatggtcgtcgtcatcgtcttgtattttagcctctggaaaggggtgaagacatcaggaaaggtggtgtggatcacagccacgctgccttacttcgtgctgttcgtgctcctggtccatggcgtcacgctgcccggagcctccaatggcatcaatgcctacctgcacatcgacttctaccgcttgaaagaggccacggtatggattgatgccgcaactcagatatttttttccttgggggctggatttggagtattgattgcatttgccagttacaacaaatttgacaacaactgttacagggatgccctgctgaccagcagcatcaactgtatcaccagcttcgtctctgggttcgccatcttctccatccttggttacatggcccatgaacacaaggtcaacattgaggatgtggccacagaaggagctggcctagtgttcatcctgtatccagaggccatttctaccctgtctggatctacattctgggctgttgtgtttttcgtcatgctcctggcgctgggccttgacagctcaatgggaggcatggaggctgtcatcacgggcctggcagatgacttccaggtcctgaagcgacaccggaaactcttcacatttggcgtcaccttcagcactttccttctcgccctgttctgcataaccaagggtggaatttacgtcttgaccctcctggacacctttgctgcgggcacctccatcctttttgctgtcctcatggaagccatcggagtttcctggttttatggagtggacaggttcagcaacgacatccagcagatgatggggttcaggccgggtctatactggagactgtgctggaagttcgtcagtcctgccttcctcctgttcgtggttgtggtcagcatcatcaacttcaagccactcacctacgacgactacatcttcccgccctgggccaactgggtggggtggggcatcgccctgtcctccatggtcctggtgcccatctacgtcatctataagttcctcagcacgcagggctctctttgggagagactggcctatggcatcacgccagagaacgagcaccacctggtggctcagagggacatcagacagttccagttgcaacactggctggccatctgagatgggtaattaattaatttttatcgatctaattcaacaatgtctggagagcttcgcaggatcccgactccggaaccaattactgataaagaagaagatcatacagttacagacactgtctcatacactacagtaagtacatcatctggaattgtcactactaaatcaaccaccgatgatacgtacaatgataatgatacagtaccaccaactactgtaggcggtagtacaacctctattagcaattataaaaccaaggactttgtagaaatatttggtattaccgcattaattatattgtcggccgtggcaatattctgtattacgtattatatatgtaataaacgttcacgtaaatacaaaacagagaacaaagtctagatttttgacttacataaatgtctgggatagtaaaatctatcagaattctagaaaagtagaaaatatattctaatttattgcacgggatgagcgaaaaatacatcgtcacctgggacatgttgcagatccatgcacgtaaactcgcaagccgactgatgccttctgaacaatggaaaggcattattgccgtaagccgtggcggtctggtaccgggtgcgttactggcgcgtgaactgggtattcgtcatgtcgataccgtttgtatttccagctacgatcacgacaaccagcgcgagcttaaagtgctgaaacgcgcagaaggcgatggcgaaggcttcatcgttattgatgacctggtggataccggtggtactgcggttgcgattcgtgaaatgtatccaaaagcgcactttgtcaccatcttcgcaaaaccggctggtcgtccgctggttgatgactatgttgttgatatcccgcaagatacctggattgaacagccgtgggatatgggcgtcgtattcgtcccgccaatctccggtcgctaaggatcagcttggcgtaatcatggtcatagctgtttcctgtgtgaaattgttatccgctcacaattccacacaacatacgagccggaagcataaagtgtaaagcctggggtgcctaatgagtgagctaactcacattaattgcgttgcgctcactgcccgctttccagtcgggaaacctgtcgtgccagctgcattaatgaatcggccaacgcgcggggagaggcggtttgcgtattgggcgctcttccgcttcctcgctcactgactcgctgcgctcggtcgttcggctgcggcgagcggtatcagctcactcaaaggcggtaatacggttatccacagaatcaggggataacgcaggaaagaacatgtgagcaaaaggccagcaaaaggccaggaaccgtaaaaaggccgcgttgctggcgtttttccataggctccgcccccctgacgagcatcacaaaaatcgacgctcaagtcagaggtggcgaaacccgacaggactataaagataccaggcgtttccccctggaagctccctcgtgcgctctcctgttccgaccctgccgcttaccggatacctgtccgcctttctcccttcgggaagcgtggcgctttctcatagctcacgctgtaggtatctcagttcggtgtaggtcgttcgctccaagctgggctgtgtgcacgaaccccccgttcagcccgaccgctgcgccttatccggtaactatcgtcttgagtccaacccggtaagacacgacttatcgccactggcagcagccactggtaacaggattagcagagcgaggtatgtaggcggtgctacagagttcttgaagtggtggcctaactacggctacactagaaggacagtatttggtatctgcgctctgctgaagccagttaccttcggaaaaagagttggtagctcttgatccggcaaacaaaccaccgctggtagcggtggtttttttgtttgcaagcagcagattacgcgcagaaaaaaaggatctcaagaagatcctttgatcttttctacggggtctgacgctcagtggaacgaaaactcacgttaagggattttggtcatgagattatcaaaaaggatcttcacctagatccttttaaattaaaaatgaagttttaaatcaatctaaagtatatatgagtaaacttggtctgacagttaccaatgcttaatcagtgaggcacctatctcagcgatctgtctatttcgttcatccatagttgcctgactccccgtcgtgtagataactacgatacgggagggcttaccatctggccccagtgctgcaatgataccgcgagacccacgctcaccggctccagatttatcagcaataaaccagccagccggaagggccgagcgcagaagtggtcctgcaactttatccgcctccatccagtctattaattgttgccgggaagctagagtaagtagttcgccagttaatagtttgcgcaacgttgttgccattgctacaggcatcgtggtgtcacgctcgtcgtttggtatggcttcattcagctccggttcccaacgatcaaggcgagttacatgatcccccatgttgtgcaaaaaagcggttagctccttcggtcctccgatcgttgtcagaagtaagttggccgcagtgttatcactcatggttatggcagcactgcataattctcttactgtcatgccatccgtaagatgcttttctgtgactggtgagtactcaaccaagtcattctgagaatagtgtatgcggcgaccgagttgctcttgcccggcgtcaatacgggataataccgcgccacatagcagaactttaaaagtgctcatcattggaaaacgttcttcggggcgaaaactctcaaggatcttaccgctgttgagatccagttcgatgtaacccactcgtgcacccaactgatcttcagcatcttttactttcaccagcgtttctgggtgagcaaaaacaggaaggcaaaatgccgcaaaaaagggaataagggcgacacggaaatgttgaatactcatactcttcctttttcaatattattgaagcatttatcagggttattgtctcatgagcggatacatatttgaatgtatttagaaaaataaacaaataggggttccgcgcacatttccccgaaaagtgccacct

SEQ ID NO: 130 - DNA, 4479 bp, Artificial Sequence
  HA-SE-RLN-7 vector
gacgtctaagaaaccattattatcatgacattaacctataaaaataggcgtatcacgaggccctttcgtctcgcgcgtttcggtgatgacggtgaaaacctctgacacatgcagctcccggagacggtcacagcttgtctgtaagcggatgccgggagcagacaagcccgtcagggcgcgtcagcgggtgttggcgggtgtcggggctggcttaactatgcggcatcagagcagattgtactgagagtgcaccatatgacacgattaccaatacttttgttactaatatcattagtatacgctacaccttttcctcagacatctaaaaaaataggtgatgatgcaactctatcatgtaatcgaaataatacaaatgactacgttgttatgagtgcttggtataaggagcccaattccattattcttttagctgctaaaagcgacgtcttgtattttgataattataccaaggataaaatatcttacgactctccatacgatgatctagttacaactatcacaattaaatcattgactgctagagatgccggtacttatgtatgtgcattctttatgacatcgcctacaaatgacactgataaagtagattatgaagaatactccacagagttgattgtaaatacagatagtgaatcgactatagacataatactatctggatctacacattcaccggaaactagttctgagaaacctgattatatagataattctaattgctcgtcggtattcgaaatctaagctcaaaaattgaaaaactagcgtctttttttgctcgaagtcgaccaccatgcctcgcctgttcttgttccacctgctagaattctgtttactactgaaccaattttccagagcagtcgcggccaaatggaaggacgatgttattaaattatgcggccgcgaattagttcgcgcgcagattgccatttgcggcatgagcacctggagcaaaaggtctctgagccaggaagatgctcctcagacacctagaccagtggcagaaattgtaccatccttcatcaacaaagatacagaaactataattatcatgttggaattcattgctaatttgccaccggagctgaaggcagccctatctgagaggcaaccatcattaccagagctacagcagtatgtacctgcattaaaggattccaatcttagctttgaagaatttaagaaacttattcgcaataggcaaagtgaagccgcagacagcaatccttcagaattaaaatacttaggcttggatactcattctcaaaaaaagagacgaccctacgtggcactgtttgagaaatgttgcctaattggttgtaccaaaaggtctcttgctaaatattgctgaaggcctggtacccgggtaattaattaatttttatcgatctaattcaacaatgtctggagagcttcgcaggatcccgactccggaaccaattactgataaagaagaagatcatacagttacagacactgtctcatacactacagtaagtacatcatctggaattgtcactactaaatcaaccaccgatgatacgtacaatgataatgatacagtaccaccaactactgtaggcggtagtacaacctctattagcaattataaaaccaaggactttgtagaaatatttggtattaccgcattaattatattgtcggccgtggcaatattctgtattacgtattatatatgtaataaacgttcacgtaaatacaaaacagagaacaaagtctagatttttgacttacataaatgtctgggatagtaaaatctatcagaattctagaaaagtagaaaatatattctaatttattgcacgggatgagcgaaaaatacatcgtcacctgggacatgttgcagatccatgcacgtaaactcgcaagccgactgatgccttctgaacaatggaaaggcattattgccgtaagccgtggcggtctggtaccgggtgcgttactggcgcgtgaactgggtattcgtcatgtcgataccgtttgtatttccagctacgatcacgacaaccagcgcgagcttaaagtgctgaaacgcgcagaaggcgatggcgaaggcttcatcgttattgatgacctggtggataccggtggtactgcggttgcgattcgtgaaatgtatccaaaagcgcactttgtcaccatcttcgcaaaaccggctggtcgtccgctggttgatgactatgttgttgatatcccgcaagatacctggattgaacagccgtgggatatgggcgtcgtattcgtcccgccaatctccggtcgctaaggatcagcttggcgtaatcatggtcatagctgtttcctgtgtgaaattgttatccgctcacaattccacacaacatacgagccggaagcataaagtgtaaagcctggggtgcctaatgagtgagctaactcacattaattgcgttgcgctcactgcccgctttccagtcgggaaacctgtcgtgccagctgcattaatgaatcggccaacgcgcggggagaggcggtttgcgtattgggcgctcttccgcttcctcgctcactgactcgctgcgctcggtcgttcggctgcggcgagcggtatcagctcactcaaaggcggtaatacggttatccacagaatcaggggataacgcaggaaagaacatgtgagcaaaaggccagcaaaaggccaggaaccgtaaaaaggccgcgttgctggcgtttttccataggctccgcccccctgacgagcatcacaaaaatcgacgctcaagtcagaggtggcgaaacccgacaggactataaagataccaggcgtttccccctggaagctccctcgtgcgctctcctgttccgaccctgccgcttaccggatacctgtccgcctttctcccttcgggaagcgtggcgctttctcatagctcacgctgtaggtatctcagttcggtgtaggtcgttcgctccaagctgggctgtgtgcacgaaccccccgttcagcccgaccgctgcgccttatccggtaactatcgtcttgagtccaacccggtaagacacgacttatcgccactggcagcagccactggtaacaggattagcagagcgaggtatgtaggcggtgctacagagttcttgaagtggtggcctaactacggctacactagaaggacagtatttggtatctgcgctctgctgaagccagttaccttcggaaaaagagttggtagctcttgatccggcaaacaaaccaccgctggtagcggtggtttttttgtttgcaagcagcagattacgcgcagaaaaaaaggatctcaagaagatcctttgatcttttctacggggtctgacgctcagtggaacgaaaactcacgttaagggattttggtcatgagattatcaaaaaggatcttcacctagatccttttaaattaaaaatgaagttttaaatcaatctaaagtatatatgagtaaacttggtctgacagttaccaatgcttaatcagtgaggcacctatctcagcgatctgtctatttcgttcatccatagttgcctgactccccgtcgtgtagataactacgatacgggagggcttaccatctggccccagtgctgcaatgataccgcgagacccacgctcaccggctccagatttatcagcaataaaccagccagccggaagggccgagcgcagaagtggtcctgcaactttatccgcctccatccagtctattaattgttgccgggaagctagagtaagtagttcgccagttaatagtttgcgcaacgttgttgccattgctacaggcatcgtggtgtcacgctcgtcgtttggtatggcttcattcagctccggttcccaacgatcaaggcgagttacatgatcccccatgttgtgcaaaaaagcggttagctccttcggtcctccgatcgttgtcagaagtaagttggccgcagtgttatcactcatggttatggcagcactgcataattctcttactgtcatgccatccgtaagatgcttttctgtgactggtgagtactcaaccaagtcattctgagaatagtgtatgcggcgaccgagttgctcttgcccggcgtcaatacgggataataccgcgccacatagcagaactttaaaagtgctcatcattggaaaacgttcttcggggcgaaaactctcaaggatcttaccgctgttgagatccagttcgatgtaacccactcgtgcacccaactgatcttcagcatcttttactttcaccagcgtttctgggtgagcaaaaacaggaaggcaaaatgccgcaaaaaagggaataagggcgacacggaaatgttgaatactcatactcttcctttttcaatattattgaagcatttatcagggttattgtctcatgagcggatacatatttgaatgtatttagaaaaataaacaaataggggttccgcgcacatttccccgaaaagtgccacct

SEQ ID NO: 131 - DNA, 4557 bp, Artificial Sequence
  HA-SE-IL24-1 vector
gacgtctaagaaaccattattatcatgacattaacctataaaaataggcgtatcacgaggccctttcgtctcgcgcgtttcggtgatgacggtgaaaacctctgacacatgcagctcccggagacggtcacagcttgtctgtaagcggatgccgggagcagacaagcccgtcagggcgcgtcagcgggtgttggcgggtgtcggggctggcttaactatgcggcatcagagcagattgtactgagagtgcaccatatgacacgattaccaatacttttgttactaatatcattagtatacgctacaccttttcctcagacatctaaaaaaataggtgatgatgcaactctatcatgtaatcgaaataatacaaatgactacgttgttatgagtgcttggtataaggagcccaattccattattcttttagctgctaaaagcgacgtcttgtattttgataattataccaaggataaaatatcttacgactctccatacgatgatctagttacaactatcacaattaaatcattgactgctagagatgccggtacttatgtatgtgcattctttatgacatcgcctacaaatgacactgataaagtagattatgaagaatactccacagagttgattgtaaatacagatagtgaatcgactatagacataatactatctggatctacacattcaccggaaactagttctgagaaacctgattatatagataattctaattgctcgtcggtattcgaaatctaagctcaaaaattgaaaaactagcgtctttttttgctcgaagtcgaccaccatgaattttcaacagaggctgcaaagcctgtggactttagccagcagacccttctgccctcctttgctggcgacagcctctcaaatgcagatggttgtgctcccttgcctgggttttaccctgcttctctggagccaggtatcaggggcccagggccaagaattccactttgggccctgccaagtgaagggggttgttccccagaaactgtgggaagccttctgggctgtgaaagacactatgcaagctcaggataacatcacgagtgcccggctgctgcagcaggaggttctgcagaacgtctcggatgctgagagctgttaccttgtccacaccctgctggagttctacttgaaaactgttttcaaaaactaccacaatagaacagttgaagtcaggactctgaagtcattctctactctggccaacaactttgttctcatcgtgtcacaactgcaacccagtcaagaaaatgagatgttttccatcagagacagtgcacacaggcggtttctgctattccggagagcattcaaacagttggacgtagaagcagctctgaccaaagcccttggggaagtggacattcttctgacctggatgcagaaattctacaagctctgataacccgggaagggcgaattctgcagatgggtaattaattaatttttatcgatctaattcaacaatgtctggagagcttcgcaggatcccgactccggaaccaattactgataaagaagatcatacagtcacagacactgtctcatacactacagtaagtacatcatctggaattgtcactactaaatcaaccaccgatgatacgtacaatgataatgatacagtaccaccaactactgtaggcggtagtacaacctctattagcaattataaaaccaaggactttgtagaaatatttggtattaccgcattaattatattgtcggccgtggcaatattctgtattacgtattatatatgtaataaacgttcacgtaaatacaaaacagagaacaaagtctagatttttgacttacataaatgtctgggatagtaaaatctatcagaattctagaaaagtagaaaatatattctaatttattgcacgggatgagcgaaaaatacatcgtcacctgggacatgttgcagatccatgcacgtaaactcgcaagccgactgatgccttctgaacaatggaaaggcattattgccgtaagccgtggcggtctggtaccgggtgcgttactggcgcgtgaactgggtattcgtcatgtcgataccgtttgtatttccagctacgatcacgacaaccagcgcgagcttaaagtgctgaaacgcgcagaaggcgatggcgaaggcttcatcgttattgatgacctggtggataccggtggtactgcggttgcgattcgtgaaatgtatccaaaagcgcactttgtcaccatcttcgcaaaaccggctggtcgtccgctggttgatgactatgttgttgatatcccgcaagatacctggattgaacagccgtgggatatgggcgtcgtattcgtcccgccaatctccggtcgctaaggatcagcttggcgtaatcatggtcatagctgtttcctgtgtgaaattgttatccgctcacaattccacacaacatacgagccggaagcataaagtgtaaagcctggggtgcctaatgagtgagctaactcacattaattgcgttgcgctcactgcccgctttccagtcgggaaacctgtcgtgccagctgcattaatgaatcggccaacgcgcggggagaggcggtttgcgtattgggcgctcttccgcttcctcgctcactgactcgctgcgctcggtcgttcggctgcggcgagcggtatcagctcactcaaaggcggtaatacggttatccacagaatcaggggataacgcaggaaagaacatgtgagcaaaaggccagcaaaaggccaggaaccgtaaaaaggccgcgttgctggcgtttttccataggctccgcccccctgacgagcatcacaaaaatcgacgctcaagtcagaggtggcgaaacccgacaggactataaagataccaggcgtttccccctggaagctccctcgtgcgctctcctgttccgaccctgccgcttaccggatacctgtccgcctttctcccttcgggaagcgtggcgctttctcatagctcacgctgtaggtatctcagttcggtgtaggtcgttcgctccaagctgggctgtgtgcacgaaccccccgttcagcccgaccgctgcgccttatccggtaactatcgtcttgagtccaacccggtaagacacgacttatcgccactggcagcagccactggtaacaggattagcagagcgaggtatgtaggcggtgctacagagttcttgaagtggtggcctaactacggctacactagaaggacagtatttggtatctgcgctctgctgaagccagttaccttcggaaaaagagttggtagctcttgatccggcaaacaaaccaccgctggtagcggtggtttttttgtttgcaagcagcagattacgcgcagaaaaaaaggatctcaagaagatcctttgatcttttctacggggtctgacgctcagtggaacgaaaactcacgttaagggattttggtcatgagattatcaaaaaggatcttcacctagatccttttaaattaaaaatgaagttttaaatcaatctaaagtatatatgagtaaacttggtctgacagttaccaatgcttaatcagtgaggcacctatctcagcgatctgtctatttcgttcatccatagttgcctgactccccgtcgtgtagataactacgatacgggagggcttaccatctggccccagtgctgcaatgataccgcgagacccacgctcaccggctccagatttatcagcaataaaccagccagccggaagggccgagcgcagaagtggtcctgcaactttatccgcctccatccagtctattaattgttgccgggaagctagagtaagtagttcgccagttaatagtttgcgcaacgttgttgccattgctacaggcatcgtggtgtcacgctcgtcgtttggtatggcttcattcagctccggttcccaacgatcaaggcgagttacatgatcccccatgttgtgcaaaaaagcggttagctccttcggtcctccgatcgttgtcagaagtaagttggccgcagtgttatcactcatggttatggcagcactgcataattctcttactgtcatgccatccgtaagatgcttttctgtgactggtgagtactcaaccaagtcattctgagaatagtgtatgcggcgaccgagttgctcttgcccggcgtcaatacgggataataccgcgccacatagcagaactttaaaagtgctcatcattggaaaacgttcttcggggcgaaaactctcaaggatcttaccgctgttgagatccagttcgatgtaacccactcgtgcacccaactgatcttcagcatcttttactttcaccagcgtttctgggtgagcaaaaacaggaaggcaaaatgccgcaaaaaagggaataagggcgacacggaaatgttgaatactcatactcttcctttttcaatattattgaagcatttatcagggttattgtctcatgagcggatacatatttgaatgtatttagaaaaataaacaaataggggttccgcgcacatttccccgaaaagtgccacct

SEQ ID NO: 132 - DNA, 32 bp, Artificial Sequence; identical to SEQ ID NO: 64
  mda-5 primer

SEQ ID NO: 133 - DNA, 34 bp, Artificial Sequence; identical to SEQ ID NO: 65
  mda-3 primer

SEQ ID NO: 134 - DNA, 5834 bp, Artificial Sequence
  HA-SE-hNIS-1 vector
gacgtctaagaaaccattattatcatgacattaacctataaaaataggcgtatcacgaggccctttcgtctcgcgcgtttcggtgatgacggtgaaaacctctgacacatgcagctcccggagacggtcacagcttgtctgtaagcggatgccgggagcagacaagcccgtcagggcgcgtcagcgggtgttggcgggtgtcggggctggcttaactatgcggcatcagagcagattgtactgagagtgcaccatatgacacgattaccaatacttttgttactaatatcattagtatacgctacaccttttcctcagacatctaaaaaaataggtgatgatgcaactctatcatgtaatcgaaataatacaaatgactacgttgttatgagtgcttggtataaggagcccaattccattattcttttagctgctaaaagcgacgtcttgtattttgataattataccaaggataaaatatcttacgactctccatacgatgatctagttacaactatcacaattaaatcattgactgctagagatgccggtacttatgtatgtgcattctttatgacatcgcctacaaatgacactgataaagtagattatgaagaatactccacagagttgattgtaaatacagatagtgaatcgactatagacataatactatctggatctacacattcaccggaaactagttctgagaaacctgattatatagataattctaattgctcgtcggtattcgaaatctaagctcaaaaattgaaaaactagcgtctttttttgctcgaagtcgaccaccatggaggccgtggagaccggggaacggcccaccttcggagcctgggactacggggtctttgccctcatgctcctggtgtccactggcatcgggctgtgggtcgggctggctcggggcgggcagcgcagcgctgaggacttcttcaccgggggccggcgcctggcggccctgcccgtgggcctgtcgctgtctgccagcttcatgtcggccgtgcaggtgctgggcgtgccgtcggaggcctatcgctatggcctcaagttcctctggatgtgcctgggccagcttctgaactcggtcctcaccgccctgctcttcatgcccgtcttctaccgcctgggcctcaccagcacctacgagtacctggagatgcgcttcagccgcgcagtgcggctctgcgggactttgcagtacattgtagccacgatgctgtacaccggcatcgtaatctacgcaccggccctcatcctgaaccaagtgaccgggctggacatctgggcgtcgctcctgtccaccggaattatctgcaccttctacacggctgtgggcggcatgaaggctgtggtctggactgatgtgttccaggtcgtggtgatgctaagtggcttctgggttgtcctggcacgcggtgtcatgcttgtgggcgggccccgccaggtgctcacgctggcccagaaccactcccggatcaacctcatggactttaaccctgacccgaggagccgctatacattctggacttttgtggtgggtggcacgttggtgtggctctccatgtatggcgtgaaccaggcgcaggtgcagcgctacgtggcttgccgcacagagaagcaggccaagctggccctgctcatcaaccaggtcggcctgttcctgatcgtgtccagcgctgcctgctgtggcatcgtcatgtttgtgttctacactgactgcgaccctctcctcctggggcgcatctctgccccagaccagtacatgcctctgctggtgctggacatcttcgaagatctgcctggagtccccgggcttttcctggcctgtgcttacagtggcaccctcagcacagcatccaccagcatcaatgctatggctgcagtcactgtagaagacctcatcaaacctcggctgcggagcctggcacccaggaaactcgtgattatctccaaggggctctcactcatctacggatcggcctgtctcaccgtggcagccctgtcctcactgctcggaggaggtgtccttcagggctccttcaccgtcatgggagtcatcagcggccccctgctgggagccttcatcttgggaatgttcctgccggcctgcaacacaccgggcgtcctcgcgggactaggcgcgggcttggcgctgtcgctgtgggtggccttgggcgccacgctgtacccacccagcgagcagaccatgagggtcctgccatcgtcggctgcccgctgcgtggctctctcagtcaacgcctctggcctcctggacccggctctcctccctgctaacgactccagcagggcccccagctcaggaatggacgccagccgacccgccttagctgacagcttctatgccatctcctatctctattacggtgccctgggcacgctgaccactgtgctgtgcggagccctcatcagctgcctgacaggccccaccaagcgcagcaccctggccccgggattgttgtggtgggacctcgcacggcagacagcatcagtggcccccaaggaagaagtggccatcctggatgacaacttggtcaagggtcctgaagaactccccactggaaacaagaagccccctggcttcctgcccaccaatgaggatcgtctgtttttcttggggcagaaggagctggagggggctggctcttggaccccctgtgttggacatgatggtggtcgagaccagcaggagacaaacctctgattaattaatttttatcgatctaattcaacaatgtctggagagcttcgcaggatcccgactccggaaccaattactgataaagaagaagatcatacagttacagacactgtctcatacactacagtaagtacatcatctggaattgtcactactaaatcaaccaccgatgatacgtacaatgataatgatacagtaccaccaactactgtaggcggtagtacaacctctattagcaattataaaaccaaggactttgtagaaatatttggtattaccgcattaattatattgtcggccgtggcaatattctgtattacgtattatatatgtaataaacgttcacgtaaatacaaaacagagaacaaagtctagatttttgacttacataaatgtctgggatagtaaaatctatcagaattctagaaaagtagaaaatatattctaatttattgcacgggatgagcgaaaaatacatcgtcacctgggacatgttgcagatccatgcacgtaaactcgcaagccgactgatgccttctgaacaatggaaaggcattattgccgtaagccgtggcggtctggtaccgggtgcgttactggcgcgtgaactgggtattcgtcatgtcgataccgtttgtatttccagctacgatcacgacaaccagcgcgagcttaaagtgctgaaacgcgcagaaggcgatggcgaaggcttcatcgttattgatgacctggtggataccggtggtactgcggttgcgattcgtgaaatgtatccaaaagcgcactttgtcaccatcttcgcaaaaccggctggtcgtccgctggttgatgactatgttgttgatatcccgcaagatacctggattgaacagccgtgggatatgggcgtcgtattcgtcccgccaatctccggtcgctaaggatcagcttggcgtaatcatggtcatagctgtttcctgtgtgaaattgttatccgctcacaattccacacaacatacgagccggaagcataaagtgtaaagcctggggtgcctaatgagtgagctaactcacattaattgcgttgcgctcactgcccgctttccagtcgggaaacctgtcgtgccagctgcattaatgaatcggccaacgcgcggggagaggcggtttgcgtattgggcgctcttccgcttcctcgctcactgactcgctgcgctcggtcgttcggctgcggcgagcggtatcagctcactcaaaggcggtaatacggttatccacagaatcaggggataacgcaggaaagaacatgtgagcaaaaggccagcaaaaggccaggaaccgtaaaaaggccgcgttgctggcgtttttccataggctccgcccccctgacgagcatcacaaaaatcgacgctcaagtcagaggtggcgaaacccgacaggactataaagataccaggcgtttccccctggaagctccctcgtgcgctctcctgttccgaccctgccgcttaccggatacctgtccgcctttctcccttcgggaagcgtggcgctttctcatagctcacgctgtaggtatctcagttcggtgtaggtcgttcgctccaagctgggctgtgtgcacgaaccccccgttcagcccgaccgctgcgccttatccggtaactatcgtcttgagtccaacccggtaagacacgacttatcgccactggcagcagccactggtaacaggattagcagagcgaggtatgtaggcggtgctacagagttcttgaagtggtggcctaactacggctacactagaaggacagtatttggtatctgcgctctgctgaagccagttaccttcggaaaaagagttggtagctcttgatccggcaaacaaaccaccgctggtagcggtggtttttttgtttgcaagcagcagattacgcgcagaaaaaaaggatctcaagaagatcctttgatcttttctacggggtctgacgctcagtggaacgaaaactcacgttaagggattttggtcatgagattatcaaaaaggatcttcacctagatccttttaaattaaaaatgaagttttaaatcaatctaaagtatatatgagtaaacttggtctgacagttaccaatgcttaatcagtgaggcacctatctcagcgatctgtctatttcgttcatccatagttgcctgactccccgtcgtgtagataactacgatacgggagggcttaccatctggccccagtgctgcaatgataccgcgagacccacgctcaccggctccagatttatcagcaataaaccagccagccggaagggccgagcgcagaagtggtcctgcaactttatccgcctccatccagtctattaattgttgccgggaagctagagtaagtagttcgccagttaatagtttgcgcaacgttgttgccattgctacaggcatcgtggtgtcacgctcgtcgtttggtatggcttcattcagctccggttcccaacgatcaaggcgagttacatgatcccccatgttgtgcaaaaaagcggttagctccttcggtcctccgatcgttgtcagaagtaagttggccgcagtgttatcactcatggttatggcagcactgcataattctcttactgtcatgccatccgtaagatgcttttctgtgactggtgagtactcaaccaagtcattctgagaatagtgtatgcggcgaccgagttgctcttgcccggcgtcaatacgggataataccgcgccacatagcagaactttaaaagtgctcatcattggaaaacgttcttcggggcgaaaactctcaaggatcttaccgctgttgagatccagttcgatgtaacccactcgtgcacccaactgatcttcagcatcttttactttcaccagcgtttctgggtgagcaaaaacaggaaggcaaaatgccgcaaaaaagggaataagggcgacacggaaatgttgaatactcatactcttcctttttcaatattattgaagcatttatcagggttattgtctcatgagcggatacatatttgaatgtatttagaaaaataaacaaataggggttccgcgcacatttccccgaaaagtgccacct

SEQ ID NO: 135 - DNA, 30 bp, Artificial Sequence
  hNIS-5 primer
gtcgaccaccatggaggccgtggagaccgg

SEQ ID NO: 136 - DNA, 36 bp, Artificial Sequence
  hNIS-3 primer
ttaattaatcagaggtttgtctcctgctggtctcga

SEQ ID NO: 137 - DNA, 5859 bp, Artificial Sequence
  HA-SEL-hNIS-2 vector
gacgtctaagaaaccattattatcatgacattaacctataaaaataggcgtatcacgaggccctttcgtctcgcgcgtttcggtgatgacggtgaaaacctctgacacatgcagctcccggagacggtcacagcttgtctgtaagcggatgccgggagcagacaagcccgtcagggcgcgtcagcgggtgttggcgggtgtcggggctggcttaactatgcggcatcagagcagattgtactgagagtgcaccatatgacacgattaccaatacttttgttactaatatcattagtatacgctacaccttttcctcagacatctaaaaaaataggtgatgatgcaactctatcatgtaatcgaaataatacaaatgactacgttgttatgagtgcttggtataaggagcccaattccattattcttttagctgctaaaagcgacgtcttgtattttgataattataccaaggataaaatatcttacgactctccatacgatgatctagttacaactatcacaattaaatcattgactgctagagatgccggtacttatgtatgtgcattctttatgacatcgcctacaaatgacactgataaagtagattatgaagaatactccacagagttgattgtaaatacagatagtgaatcgactatagacataatactatctggatctacacattcaccggaaactagttctgagaaacctgattatatagataattctaattgctcgtcggtattcgaaatctaagcttaaaaattgaaattttattttttttttttggaatataaataagctcgaagtcgaccaccatggaggccgtggagaccggggaacggcccaccttcggagcctgggactacggggtctttgccctcatgctcctggtgtccactggcatcgggctgtgggtcgggctggctcggggcgggcagcgcagcgctgaggacttcttcaccgggggccggcgcctggcggccctgcccgtgggcctgtcgctgtctgccagcttcatgtcggccgtgcaggtgctgggcgtgccgtcggaggcctatcgctatggcctcaagttcctctggatgtgcctgggccagcttctgaactcggtcctcaccgccctgctcttcatgcccgtcttctaccgcctgggcctcaccagcacctacgagtacctggagatgcgcttcagccgcgcagtgcggctctgcgggactttgcagtacattgtagccacgatgctgtacaccggcatcgtaatctacgcaccggccctcatcctgaaccaagtgaccgggctggacatctgggcgtcgctcctgtccaccggaattatctgcaccttctacacggctgtgggcggcatgaaggctgtggtctggactgatgtgttccaggtcgtggtgatgctaagtggcttctgggttgtcctggcacgcggtgtcatgcttgtgggcgggccccgccaggtgctcacgctggcccagaaccactcccggatcaacctcatggactttaaccctgacccgaggagccgctatacattctggacttttgtggtgggtggcacgttggtgtggctctccatgtatggcgtgaaccaggcgcaggtgcagcgctacgtggcttgccgcacagagaagcaggccaagctggccctgctcatcaaccaggtcggcctgttcctgatcgtgtccagcgctgcctgctgtggcatcgtcatgtttgtgttctacactgactgcgaccctctcctcctggggcgcatctctgccccagaccagtacatgcctctgctggtgctggacatcttcgaagatctgcctggagtccccgggcttttcctggcctgtgcttacagtggcaccctcagcacagcatccaccagcatcaatgctatggctgcagtcactgtagaagacctcatcaaacctcggctgcggagcctggcacccaggaaactcgtgattatctccaaggggctctcactcatctacggatcggcctgtctcaccgtggcagccctgtcctcactgctcggaggaggtgtccttcagggctccttcaccgtcatgggagtcatcagcggccccctgctgggagccttcatcttgggaatgttcctgccggcctgcaacacaccgggcgtcctcgcgggactaggcgcgggcttggcgctgtcgctgtgggtggccttgggcgccacgctgtacccacccagcgagcagaccatgagggtcctgccatcgtcggctgcccgctgcgtggctctctcagtcaacgcctctggcctcctggacccggctctcctccctgctaacgactccagcagggcccccagctcaggaatggacgccagccgacccgccttagctgacagcttctatgccatctcctatctctattacggtgccctgggcacgctgaccactgtgctgtgcggagccctcatcagctgcctgacaggccccaccaagcgcagcaccctggccccgggattgttgtggtgggacctcgcacggcagacagcatcagtggcccccaaggaagaagtggccatcctggatgacaacttggtcaagggtcctgaagaactccccactggaaacaagaagccccctggcttcctgcccaccaatgaggatcgtctgtttttcttggggcagaaggagctggagggggctggctcttggaccccctgtgttggacatgatggtggtcgagaccagcaggagacaaacctctgattaattaatttttatcgatctaattcaacaatgtctggagagctcggtaccaagcttcgcaggatcccgactccggaaccaattactgataaagaagaagatcatacagttacagacactgtctcatacactacagtaagtacatcatctggaattgtcactactaaatcaaccaccgatgatacgtacaatgataatgatacagtaccaccaactactgtaggcggtagtacaacctctattagcaattataaaaccaaggactttgtagaaatatttggtattaccgcattaattatattgtcggccgtggcaatattctgtattacgtattatatatgtaataaacgttcacgtaaatacaaaacagagaacaaagtctagatttttgacttacataaatgtctgggatagtaaaatctatcagaattctagaaaagtagaaaatatattctaatttattgcacgggatgagcgaaaaatacatcgtcacctgggacatgttgcagatccatgcacgtaaactcgcaagccgactgatgccttctgaacaatggaaaggcattattgccgtaagccgtggcggtctggtaccgggtgcgttactggcgcgtgaactgggtattcgtcatgtcgataccgtttgtatttccagctacgatcacgacaaccagcgcgagcttaaagtgctgaaacgcgcagaaggcgatggcgaaggcttcatcgttattgatgacctggtggataccggtggtactgcggttgcgattcgtgaaatgtatccaaaagcgcactttgtcaccatcttcgcaaaaccggctggtcgtccgctggttgatgactatgttgttgatatcccgcaagatacctggattgaacagccgtgggatatgggcgtcgtattcgtcccgccaatctccggtcgctaaggatcagcttggcgtaatcatggtcatagctgtttcctgtgtgaaattgttatccgctcacaattccacacaacatacgagccggaagcataaagtgtaaagcctggggtgcctaatgagtgagctaactcacattaattgcgttgcgctcactgcccgctttccagtcgggaaacctgtcgtgccagctgcattaatgaatcggccaacgcgcggggagaggcggtttgcgtattgggcgctcttccgcttcctcgctcactgactcgctgcgctcggtcgttcggctgcggcgagcggtatcagctcactcaaaggcggtaatacggttatccacagaatcaggggataacgcaggaaagaacatgtgagcaaaaggccagcaaaaggccaggaaccgtaaaaaggccgcgttgctggcgtttttccataggctccgcccccctgacgagcatcacaaaaatcgacgctcaagtcagaggtggcgaaacccgacaggactataaagataccaggcgtttccccctggaagctccctcgtgcgctctcctgttccgaccctgccgcttaccggatacctgtccgcctttctcccttcgggaagcgtggcgctttctcatagctcacgctgtaggtatctcagttcggtgtaggtcgttcgctccaagctgggctgtgtgcacgaaccccccgttcagcccgaccgctgcgccttatccggtaactatcgtcttgagtccaacccggtaagacacgacttatcgccactggcagcagccactggtaacaggattagcagagcgaggtatgtaggcggtgctacagagttcttgaagtggtggcctaactacggctacactagaaggacagtatttggtatctgcgctctgctgaagccagttaccttcggaaaaagagttggtagctcttgatccggcaaacaaaccaccgctggtagcggtggtttttttgtttgcaagcagcagattacgcgcagaaaaaaaggatctcaagaagatcctttgatcttttctacggggtctgacgctcagtggaacgaaaactcacgttaagggattttggtcatgagattatcaaaaaggatcttcacctagatccttttaaattaaaaatgaagttttaaatcaatctaaagtatatatgagtaaacttggtctgacagttaccaatgcttaatcagtgaggcacctatctcagcgatctgtctatttcgttcatccatagttgcctgactccccgtcgtgtagataactacgatacgggagggcttaccatctggccccagtgctgcaatgataccgcgagacccacgctcaccggctccagatttatcagcaataaaccagccagccggaagggccgagcgcagaagtggtcctgcaactttatccgcctccatccagtctattaattgttgccgggaagctagagtaagtagttcgccagttaatagtttgcgcaacgttgttgccattgctacaggcatcgtggtgtcacgctcgtcgtttggtatggcttcattcagctccggttcccaacgatcaaggcgagttacatgatcccccatgttgtgcaaaaaagcggttagctccttcggtcctccgatcgttgtcagaagtaagttggccgcagtgttatcactcatggttatggcagcactgcataattctcttactgtcatgccatccgtaagatgcttttctgtgactggtgagtactcaaccaagtcattctgagaatagtgtatgcggcgaccgagttgctcttgcccggcgtcaatacgggataataccgcgccacatagcagaactttaaaagtgctcatcattggaaaacgttcttcggggcgaaaactctcaaggatcttaccgctgttgagatccagttcgatgtaacccactcgtgcacccaactgatcttcagcatcttttactttcaccagcgtttctgggtgagcaaaaacaggaaggcaaaatgccgcaaaaaagggaataagggcgacacggaaatgttgaatactcatactcttcctttttcaatattattgaagcatttatcagggttattgtctcatgagcggatacatatttgaatgtatttagaaaaataaacaaataggggttccgcgcacatttccccgaaaagtgccacct

SEQ ID NO: 138 - DNA, 4514 bp, Artificial Sequence
  HA-SEL-RLN-2 vector
gacgtctaagaaaccattattatcatgacattaacctataaaaataggcgtatcacgaggccctttcgtctcgcgcgtttcggtgatgacggtgaaaacctctgacacatgcagctcccggagacggtcacagcttgtctgtaagcggatgccgggagcagacaagcccgtcagggcgcgtcagcgggtgttggcgggtgtcggggctggcttaactatgcggcatcagagcagattgtactgagagtgcaccatatgacacgattaccaatacttttgttactaatatcattagtatacgctacaccttttcctcagacatctaaaaaaataggtgatgatgcaactctatcatgtaatcgaaataatacaaatgactacgttgttatgagtgcttggtataaggagcccaattccattattcttttagctgctaaaagcgacgtcttgtattttgataattataccaaggataaaatatcttacgactctccatacgatgatctagttacaactatcacaattaaatcattgactgctagagatgccggtacttatgtatgtgcattctttatgacatcgcctacaaatgacactgataaagtagattatgaagaatactccacagagttgattgtaaatacagatagtgaatcgactatagacataatactatctggatctacacattcaccggaaactagttctgagaaacctgattatatagataattctaattgctcgtcggtattcgaaatctaagctcggtttggaattagtgaaagcttaaaaattgaaattttattttttttttttggaatataaataagctcgaagtcgaccaccatgcctcgcctgttcttgttccacctgctagaattctgtttactactgaaccaattttccagagcagtcgcggccaaatggaaggacgatgttattaaattatgcggccgcgaattagttcgcgcgcagattgccatttgcggcatgagcacctggagcaaaaggtctctgagccaggaagatgctcctcagacacctagaccagtggcagaaattgtaccatccttcatcaacaaagatacagaaactataattatcatgttggaattcattgctaatttgccaccggagctgaaggcagccctatctgagaggcaaccatcattaccagagctacagcagtatgtacctgcattaaaggattccaatcttagctttgaagaatttaagaaacttattcgcaataggcaaagtgaagccgcagacagcaatccttcagaattaaaatacttaggcttggatactcattctcaaaaaaagagacgaccctacgtggcactgtttgagaaatgttgcctaattggttgtaccaaaaggtctcttgctaaatattgctgaaggcctggtacccgggtaattaattaatttttatcgatctaattcaacaatgtctggagagcttcgcaggatcccgactccggaaccaattactgataaagaagaagatcatacagttacagacactgtctcatacactacagtaagtacatcatctggaattgtcactactaaatcaaccaccgatgatacgtacaatgataatgatacagtaccaccaactactgtaggcggtagtacaacctctattagcaattataaaaccaaggactttgtagaaatatttggtattaccgcattaattatattgtcggccgtggcaatattctgtattacgtattatatatgtaataaacgttcacgtaaatacaaaacagagaacaaagtctagatttttgacttacataaatgtctgggatagtaaaatctatcagaattctagaaaagtagaaaatatattctaatttattgcacgggatgagcgaaaaatacatcgtcacctgggacatgttgcagatccatgcacgtaaactcgcaagccgactgatgccttctgaacaatggaaaggcattattgccgtaagccgtggcggtctggtaccgggtgcgttactggcgcgtgaactgggtattcgtcatgtcgataccgtttgtatttccagctacgatcacgacaaccagcgcgagcttaaagtgctgaaacgcgcagaaggcgatggcgaaggcttcatcgttattgatgacctggtggataccggtggtactgcggttgcgattcgtgaaatgtatccaaaagcgcactttgtcaccatcttcgcaaaaccggctggtcgtccgctggttgatgactatgttgttgatatcccgcaagatacctggattgaacagccgtgggatatgggcgtcgtattcgtcccgccaatctccggtcgctaaggatcagcttggcgtaatcatggtcatagctgtttcctgtgtgaaattgttatccgctcacaattccacacaacatacgagccggaagcataaagtgtaaagcctggggtgcctaatgagtgagctaactcacattaattgcgttgcgctcactgcccgctttccagtcgggaaacctgtcgtgccagctgcattaatgaatcggccaacgcgcggggagaggcggtttgcgtattgggcgctcttccgcttcctcgctcactgactcgctgcgctcggtcgttcggctgcggcgagcggtatcagctcactcaaaggcggtaatacggttatccacagaatcaggggataacgcaggaaagaacatgtgagcaaaaggccagcaaaaggccaggaaccgtaaaaaggccgcgttgctggcgtttttccataggctccgcccccctgacgagcatcacaaaaatcgacgctcaagtcagaggtggcgaaacccgacaggactataaagataccaggcgtttccccctggaagctccctcgtgcgctctcctgttccgaccctgccgcttaccggatacctgtccgcctttctcccttcgggaagcgtggcgctttctcatagctcacgctgtaggtatctcagttcggtgtaggtcgttcgctccaagctgggctgtgtgcacgaaccccccgttcagcccgaccgctgcgccttatccggtaactatcgtcttgagtccaacccggtaagacacgacttatcgccactggcagcagccactggtaacaggattagcagagcgaggtatgtaggcggtgctacagagttcttgaagtggtggcctaactacggctacactagaaggacagtatttggtatctgcgctctgctgaagccagttaccttcggaaaaagagttggtagctcttgatccggcaaacaaaccaccgctggtagcggtggtttttttgtttgcaagcagcagattacgcgcagaaaaaaaggatctcaagaagatcctttgatcttttctacggggtctgacgctcagtggaacgaaaactcacgttaagggattttggtcatgagattatcaaaaaggatcttcacctagatccttttaaattaaaaatgaagttttaaatcaatctaaagtatatatgagtaaacttggtctgacagttaccaatgcttaatcagtgaggcacctatctcagcgatctgtctatttcgttcatccatagttgcctgactccccgtcgtgtagataactacgatacgggagggcttaccatctggccccagtgctgcaatgataccgcgagacccacgctcaccggctccagatttatcagcaataaaccagccagccggaagggccgagcgcagaagtggtcctgcaactttatccgcctccatccagtctattaattgttgccgggaagctagagtaagtagttcgccagttaatagtttgcgcaacgttgttgccattgctacaggcatcgtggtgtcacgctcgtcgtttggtatggcttcattcagctccggttcccaacgatcaaggcgagttacatgatcccccatgttgtgcaaaaaagcggttagctccttcggtcctccgatcgttgtcagaagtaagttggccgcagtgttatcactcatggttatggcagcactgcataattctcttactgtcatgccatccgtaagatgcttttctgtgactggtgagtactcaaccaagtcattctgagaatagtgtatgcggcgaccgagttgctcttgcccggcgtcaatacgggataataccgcgccacatagcagaactttaaaagtgctcatcattggaaaacgttcttcggggcgaaaactctcaaggatcttaccgctgttgagatccagttcgatgtaacccactcgtgcacccaactgatcttcagcatcttttactttcaccagcgtttctgggtgagcaaaaacaggaaggcaaaatgccgcaaaaaagggaataagggcgacacggaaatgttgaatactcatactcttcctttttcaatattattgaagcatttatcagggttattgtctcatgagcggatacatatttgaatgtatttagaaaaataaacaaataggggttccgcgcacatttccccgaaaagtgccacct

SEQ ID NO: 139 - DNA, 5832 bp, Artificial Sequence
  HA-SL-hNIS-1
gacgtctaagaaaccattattatcatgacattaacctataaaaataggcgtatcacgaggccctttcgtctcgcgcgtttcggtgatgacggtgaaaacctctgacacatgcagctcccggagacggtcacagcttgtctgtaagcggatgccgggagcagacaagcccgtcagggcgcgtcagcgggtgttggcgggtgtcggggctggcttaactatgcggcatcagagcagattgtactgagagtgcaccatatgacacgattaccaatacttttgttactaatatcattagtatacgctacaccttttcctcagacatctaaaaaaataggtgatgatgcaactctatcatgtaatcgaaataatacaaatgactacgttgttatgagtgcttggtataaggagcccaattccattattcttttagctgctaaaagcgacgtcttgtattttgataattataccaaggataaaatatcttacgactctccatacgatgatctagttacaactatcacaattaaatcattgactgctagagatgccggtacttatgtatgtgcattctttatgacatcgcctacaaatgacactgataaagtagattatgaagaatactccacagagttgattgtaaatacagatagtgaatcgactatagacataatactatctggatctacacattcaccggaaactagttctgagaaacctgattatatagataattctaattgctcgtcggtattcgaaatctaagctcttttttttttttttttttttggcatataaataagtcgaccaccatggaggccgtggagaccggggaacggcccaccttcggagcctgggactacggggtctttgccctcatgctcctggtgtccactggcatcgggctgtgggtcgggctggctcggggcgggcagcgcagcgctgaggacttcttcaccgggggccggcgcctggcggccctgcccgtgggcctgtcgctgtctgccagcttcatgtcggccgtgcaggtgctgggcgtgccgtcggaggcctatcgctatggcctcaagttcctctggatgtgcctgggccagcttctgaactcggtcctcaccgccctgctcttcatgcccgtcttctaccgcctgggcctcaccagcacctacgagtacctggagatgcgcttcagccgcgcagtgcggctctgcgggactttgcagtacattgtagccacgatgctgtacaccggcatcgtaatctacgcaccggccctcatcctgaaccaagtgaccgggctggacatctgggcgtcgctcctgtccaccggaattatctgcaccttctacacggctgtgggcggcatgaaggctgtggtctggactgatgtgttccaggtcgtggtgatgctaagtggcttctgggttgtcctggcacgcggtgtcatgcttgtgggcgggccccgccaggtgctcacgctggcccagaaccactcccggatcaacctcatggactttaaccctgacccgaggagccgctatacattctggacttttgtggtgggtggcacgttggtgtggctctccatgtatggcgtgaaccaggcgcaggtgcagcgctacgtggcttgccgcacagagaagcaggccaagctggccctgctcatcaaccaggtcggcctgttcctgatcgtgtccagcgctgcctgctgtggcatcgtcatgtttgtgttctacactgactgcgaccctctcctcctggggcgcatctctgccccagaccagtacatgcctctgctggtgctggacatcttcgaagatctgcctggagtccccgggcttttcctggcctgtgcttacagtggcaccctcagcacagcatccaccagcatcaatgctatggctgcagtcactgtagaagacctcatcaaacctcggctgcggagcctggcacccaggaaactcgtgattatctccaaggggctctcactcatctacggatcggcctgtctcaccgtggcagccctgtcctcactgctcggaggaggtgtccttcagggctccttcaccgtcatgggagtcatcagcggccccctgctgggagccttcatcttgggaatgttcctgccggcctgcaacacaccgggcgtcctcgcgggactaggcgcgggcttggcgctgtcgctgtgggtggccttgggcgccacgctgtacccacccagcgagcagaccatgagggtcctgccatcgtcggctgcccgctgcgtggctctctcagtcaacgcctctggcctcctggacccggctctcctccctgctaacgactccagcagggcccccagctcaggaatggacgccagccgacccgccttagctgacagcttctatgccatctcctatctctattacggtgccctgggcacgctgaccactgtgctgtgcggagccctcatcagctgcctgacaggccccaccaagcgcagcaccctggccccgggattgttgtggtgggacctcgcacggcagacagcatcagtggcccccaaggaagaagtggccatcctggatgacaacttggtcaagggtcctgaagaactccccactggaaacaagaagccccctggcttcctgcccaccaatgaggatcgtctgtttttcttggggcagaaggagctggagggggctggctcttggaccccctgtgttggacatgatggtggtcgagaccagcaggagacaaacctctgattaattaatttttatcgatctaattcaacaatgtctggagagcttcgcaggatcccgactccggaaccaattactgataaagaagaagatcatacagttacagacactgtctcatacactacagtaagtacatcatctggaattgtcactactaaatcaaccaccgatgatacgtacaatgataatgatacagtaccaccaactactgtaggcggtagtacaacctctattagcaattataaaaccaaggactttgtagaaatatttggtattaccgcattaattatattgtcggccgtggcaatattctgtattacgtattatatatgtaataaacgttcacgtaaatacaaaacagagaacaaagtctagatttttgacttacataaatgtctgggatagtaaaatctatcagaattctagaaaagtagaaaatatattctaatttattgcacgggatgagcgaaaaatacatcgtcacctgggacatgttgcagatccatgcacgtaaactcgcaagccgactgatgccttctgaacaatggaaaggcattattgccgtaagccgtggcggtctggtaccgggtgcgttactggcgcgtgaactgggtattcgtcatgtcgataccgtttgtatttccagctacgatcacgacaaccagcgcgagcttaaagtgctgaaacgcgcagaaggcgatggcgaaggcttcatcgttattgatgacctggtggataccggtggtactgcggttgcgattcgtgaaatgtatccaaaagcgcactttgtcaccatcttcgcaaaaccggctggtcgtccgctggttgatgactatgttgttgatatcccgcaagatacctggattgaacagccgtgggatatgggcgtcgtattcgtcccgccaatctccggtcgctaaggatcagcttggcgtaatcatggtcatagctgtttcctgtgtgaaattgttatccgctcacaattccacacaacatacgagccggaagcataaagtgtaaagcctggggtgcctaatgagtgagctaactcacattaattgcgttgcgctcactgcccgctttccagtcgggaaacctgtcgtgccagctgcattaatgaatcggccaacgcgcggggagaggcggtttgcgtattgggcgctcttccgcttcctcgctcactgactcgctgcgctcggtcgttcggctgcggcgagcggtatcagctcactcaaaggcggtaatacggttatccacagaatcaggggataacgcaggaaagaacatgtgagcaaaaggccagcaaaaggccaggaaccgtaaaaaggccgcgttgctggcgtttttccataggctccgcccccctgacgagcatcacaaaaatcgacgctcaagtcagaggtggcgaaacccgacaggactataaagataccaggcgtttccccctggaagctccctcgtgcgctctcctgttccgaccctgccgcttaccggatacctgtccgcctttctcccttcgggaagcgtggcgctttctcatagctcacgctgtaggtatctcagttcggtgtaggtcgttcgctccaagctgggctgtgtgcacgaaccccccgttcagcccgaccgctgcgccttatccggtaactatcgtcttgagtccaacccggtaagacacgacttatcgccactggcagcagccactggtaacaggattagcagagcgaggtatgtaggcggtgctacagagttcttgaagtggtggcctaactacggctacactagaaggacagtatttggtatctgcgctctgctgaagccagttaccttcggaaaaagagttggtagctcttgatccggcaaacaaaccaccgctggtagcggtggtttttttgtttgcaagcagcagattacgcgcagaaaaaaaggatctcaagaagatcctttgatcttttctacggggtctgacgctcagtggaacgaaaactcacgttaagggattttggtcatgagattatcaaaaaggatcttcacctagatccttttaaattaaaaatgaagttttaaatcaatctaaagtatatatgagtaaacttggtctgacagttaccaatgcttaatcagtgaggcacctatctcagcgatctgtctatttcgttcatccatagttgcctgactccccgtcgtgtagataactacgatacgggagggcttaccatctggccccagtgctgcaatgataccgcgagacccacgctcaccggctccagatttatcagcaataaaccagccagccggaagggccgagcgcagaagtggtcctgcaactttatccgcctccatccagtctattaattgttgccgggaagctagagtaagtagttcgccagttaatagtttgcgcaacgttgttgccattgctacaggcatcgtggtgtcacgctcgtcgtttggtatggcttcattcagctccggttcccaacgatcaaggcgagttacatgatcccccatgttgtgcaaaaaagcggttagctccttcggtcctccgatcgttgtcagaagtaagttggccgcagtgttatcactcatggttatggcagcactgcataattctcttactgtcatgccatccgtaagatgcttttctgtgactggtgagtactcaaccaagtcattctgagaatagtgtatgcggcgaccgagttgctcttgcccggcgtcaatacgggataataccgcgccacatagcagaactttaaaagtgctcatcattggaaaacgttcttcggggcgaaaactctcaaggatcttaccgctgttgagatccagttcgatgtaacccactcgtgcacccaactgatcttcagcatcttttactttcaccagcgtttctgggtgagcaaaaacaggaaggcaaaatgccgcaaaaaagggaataagggcgacacggaaatgttgaatactcatactcttcctttttcaatattattgaagcatttatcagggttattgtctcatgagcggatacatatttgaatgtatttagaaaaataaacaaataggggttccgcgcacatttccccgaaaagtgccacct

SEQ ID NO: 140 - DNA, 4477 bp, Artificial Sequence
  HA-SL-RLN-3
gacgtctaagaaaccattattatcatgacattaacctataaaaataggcgtatcacgaggccctttcgtctcgcgcgtttcggtgatgacggtgaaaacctctgacacatgcagctcccggagacggtcacagcttgtctgtaagcggatgccgggagcagacaagcccgtcagggcgcgtcagcgggtgttggcgggtgtcggggctggcttaactatgcggcatcagagcagattgtactgagagtgcaccatatgacacgattaccaatacttttgttactaatatcattagtatacgctacaccttttcctcagacatctaaaaaaataggtgatgatgcaactctatcatgtaatcgaaataatacaaatgactacgttgttatgagtgcttggtataaggagcccaattccattattcttttagctgctaaaagcgacgtcttgtattttgataattataccaaggataaaatatcttacgactctccatacgatgatctagttacaactatcacaattaaatcattgactgctagagatgccggtacttatgtatgtgcattctttatgacatcgcctacaaatgacactgataaagtagattatgaagaatactccacagagttgattgtaaatacagatagtgaatcgactatagacataatactatctggatctacacattcaccggaaactagttctgagaaacctgattatatagataattctaattgctcgtcggtattcgaaatctaagctcttttttttttttttttttttggcatataaataagtcgaccaccatgcctcgcctgttcttgttccacctgctagaattctgtttactactgaaccaattttccagagcagtcgcggccaaatggaaggacgatgttattaaattatgcggccgcgaattagttcgcgcgcagattgccatttgcggcatgagcacctggagcaaaaggtctctgagccaggaagatgctcctcagacacctagaccagtggcagaaattgtaccatccttcatcaacaaagatacagaaactataattatcatgttggaattcattgctaatttgccaccggagctgaaggcagccctatctgagaggcaaccatcattaccagagctacagcagtatgtacctgcattaaaggattccaatcttagctttgaagaatttaagaaacttattcgcaataggcaaagtgaagccgcagacagcaatccttcagaattaaaatacttaggcttggatactcattctcaaaaaaagagacgaccctacgtggcactgtttgagaaatgttgcctaattggttgtaccaaaaggtctcttgctaaatattgctgaaggcctggtacccgggtaattaattaatttttatcgatctaattcaacaatgtctggagagcttcgcaggatcccgactccggaaccaattactgataaagaagaagatcatacagttacagacactgtctcatacactacagtaagtacatcatctggaattgtcactactaaatcaaccaccgatgatacgtacaatgataatgatacagtaccaccaactactgtaggcggtagtacaacctctattagcaattataaaaccaaggactttgtagaaatatttggtattaccgcattaattatattgtcggccgtggcaatattctgtattacgtattatatatgtaataaacgttcacgtaaatacaaaacagagaacaaagtctagatttttgacttacataaatgtctgggatagtaaaatctatcagaattctagaaaagtagaaaatatattctaatttattgcacgggatgagcgaaaaatacatcgtcacctgggacatgttgcagatccatgcacgtaaactcgcaagccgactgatgccttctgaacaatggaaaggcattattgccgtaagccgtggcggtctggtaccgggtgcgttactggcgcgtgaactgggtattcgtcatgtcgataccgtttgtatttccagctacgatcacgacaaccagcgcgagcttaaagtgctgaaacgcgcagaaggcgatggcgaaggcttcatcgttattgatgacctggtggataccggtggtactgcggttgcgattcgtgaaatgtatccaaaagcgcactttgtcaccatcttcgcaaaaccggctggtcgtccgctggttgatgactatgttgttgatatcccgcaagatacctggattgaacagccgtgggatatgggcgtcgtattcgtcccgccaatctccggtcgctaaggatcagcttggcgtaatcatggtcatagctgtttcctgtgtgaaattgttatccgctcacaattccacacaacatacgagccggaagcataaagtgtaaagcctggggtgcctaatgagtgagctaactcacattaattgcgttgcgctcactgcccgctttccagtcgggaaacctgtcgtgccagctgcattaatgaatcggccaacgcgcggggagaggcggtttgcgtattgggcgctcttccgcttcctcgctcactgactcgctgcgctcggtcgttcggctgcggcgagcggtatcagctcactcaaaggcggtaatacggttatccacagaatcaggggataacgcaggaaagaacatgtgagcaaaaggccagcaaaaggccaggaaccgtaaaaaggccgcgttgctggcgtttttccataggctccgcccccctgacgagcatcacaaaaatcgacgctcaagtcagaggtggcgaaacccgacaggactataaagataccaggcgtttccccctggaagctccctcgtgcgctctcctgttccgaccctgccgcttaccggatacctgtccgcctttctcccttcgggaagcgtggcgctttctcatagctcacgctgtaggtatctcagttcggtgtaggtcgttcgctccaagctgggctgtgtgcacgaaccccccgttcagcccgaccgctgcgccttatccggtaactatcgtcttgagtccaacccggtaagacacgacttatcgccactggcagcagccactggtaacaggattagcagagcgaggtatgtaggcggtgctacagagttcttgaagtggtggcctaactacggctacactagaaggacagtatttggtatctgcgctctgctgaagccagttaccttcggaaaaagagttggtagctcttgatccggcaaacaaaccaccgctggtagcggtggtttttttgtttgcaagcagcagattacgcgcagaaaaaaaggatctcaagaagatcctttgatcttttctacggggtctgacgctcagtggaacgaaaactcacgttaagggattttggtcatgagattatcaaaaaggatcttcacctagatccttttaaattaaaaatgaagttttaaatcaatctaaagtatatatgagtaaacttggtctgacagttaccaatgcttaatcagtgaggcacctatctcagcgatctgtctatttcgttcatccatagttgcctgactccccgtcgtgtagataactacgatacgggagggcttaccatctggccccagtgctgcaatgataccgcgagacccacgctcaccggctccagatttatcagcaataaaccagccagccggaagggccgagcgcagaagtggtcctgcaactttatccgcctccatccagtctattaattgttgccgggaagctagagtaagtagttcgccagttaatagtttgcgcaacgttgttgccattgctacaggcatcgtggtgtcacgctcgtcgtttggtatggcttcattcagctccggttcccaacgatcaaggcgagttacatgatcccccatgttgtgcaaaaaagcggttagctccttcggtcctccgatcgttgtcagaagtaagttggccgcagtgttatcactcatggttatggcagcactgcataattctcttactgtcatgccatccgtaagatgcttttctgtgactggtgagtactcaaccaagtcattctgagaatagtgtatgcggcgaccgagttgctcttgcccggcgtcaatacgggataataccgcgccacatagcagaactttaaaagtgctcatcattggaaaacgttcttcggggcgaaaactctcaaggatcttaccgctgttgagatccagttcgatgtaacccactcgtgcacccaactgatcttcagcatcttttactttcaccagcgtttctgggtgagcaaaaacaggaaggcaaaatgccgcaaaaaagggaataagggcgacacggaaatgttgaatactcatactcttcctttttcaatattattgaagcatttatcagggttattgtctcatgagcggatacatatttgaatgtatttagaaaaataaacaaataggggttccgcgcacatttccccgaaaagtgccacct

SEQ ID NO: 141 - DNA, 1854 bp, Homo sapiens
  norepinephrine transporter cDNA
atgcttctggcgcggatgaacccgcaggtgcagcccgagaacaacggggcggacacgggtccagagcagccccttcgggcgcgcaaaactgcggagctgctggtggtgaaggagcgcaacggcgtccagtgcctgctggcgccccgcgacggcgacgcgcagccccgggagacctggggcaagaagatcgacttcctgctgtccgtagtcggcttcgcagtggacctggccaacgtgtggcgcttcccctacctctgctacaagaacggcggcggtgccttcttgatcccgtacacactgttccttatcatcgcggggatgcccctgttctacatggagctggctctgggacagtacaaccgggagggggctgccaccgtttggaaaatctgcccattcttcaaaggcgttggctatgctgtcatcctgatcgccctgtacgttggcttctactacaacgtcatcatcgcctggtcactctactacctcttctcctccttcaccctcaacctgccctggaccgactgtggccacacctggaacagccccaactgtaccgaccccaagctcctcaatggctccgtgcttggcaaccacaccaagtactccaagtacaagttcacgccggcagccgagttttatgagcgtggtgtcctgcaccttcacgagagcagcgggattcatgacatcggcctgccccagtggcagctcttgctctgtctgatggtcgtcgtcatcgtcttgtattttagcctctggaaaggggtgaagacatcaggaaaggtggtgtggatcacagccacgctgccttacttcgtgctgttcgtgctcctggtccatggcgtcacgctgcccggagcctccaatggcatcaatgcctacctgcacatcgacttctaccgcttgaaagaggccacggtatggattgatgccgcaactcagatatttttttccttgggggctggatttggagtattgattgcatttgccagttacaacaaatttgacaacaactgttacagggatgccctgctgaccagcagcatcaactgtatcaccagcttcgtctctgggttcgccatcttctccatccttggttacatggcccatgaacacaaggtcaacattgaggatgtggccacagaaggagctggcctagtgttcatcctgtatccagaggccatttctaccctgtctggatctacattctgggctgttgtgtttttcgtcatgctcctggcgctgggccttgacagctcaatgggaggcatggaggctgtcatcacgggcctggcagatgacttccaggtcctgaagcgacaccggaaactcttcacatttggcgtcaccttcagcactttccttctcgccctgttctgcataaccaagggtggaatttacgtcttgaccctcctggacacctttgctgcgggcacctccatcctttttgctgtcctcatggaagccatcggagtttcctggttttatggagtggacaggttcagcaacgacatccagcagatgatggggttcaggccgggtctatactggagactgtgctggaagttcgtcagtcctgccttcctcctgttcgtggttgtggtcagcatcatcaacttcaagccactcacctacgacgactacatcttcccgccctgggccaactgggtggggtggggcatcgccctgtcctccatggtcctggtgcccatctacgtcatctataagttcctcagcacgcagggctctctttgggagagactggcctatggcatcacgccagagaacgagcaccacctggtggctcagagggacatcagacagttccagttgcaacactggctggccatctga

SEQ ID NO: 142 - protein, 617 aa, Homo sapiens [sequence omitted]

SEQ ID NO: 143 - protein, 643 aa, Homo sapiens
  NIS (Q92911)
MEAVETGERPTFGAWDYGVFALMLLVSTGIGLWVGLARGGQRSAEDFFTGGRRLAALPVGLSLSASFMSAVQVLGVPSEAYRYGLKFLWMCLGQLLNSVLTALLFMPVFYRLGLTSTYEYLEMRFSRAVRLCGTLQYIVATMLYTGIVIYAPALILNQVTGLDIWASLLSTGIICTFYTAVGGMKAVVWTDVFQVVVMLSGFWVVLARGVMLVGGPRQVLTLAQNHSRINLMDFNPDPRSRYTFWTFVVGGTLVWLSMYGVNQAQVQRYVACRTEKQAKLALLINQVGLFLIVSSAACCGIVMFVFYTDCDPLLLGRISAPDQYMPLLVLDIFEDLPGVPGLFLACAYSGTLSTASTSINAMAAVTVEDLIKPRLRSLAPRKLVIISKGLSLIYGSACLTVAALSSLLGGGVLQGSFTVMGVISGPLLGAFILGMFLPACNTPGVLAGLGAGLALSLWVALGATLYPPSEQTMRVLPSSAARCVALSVNASGLLDPALLPANDSSRAPSSGMDASRPALADSFYAISYLYYGALGTLTTVLCGALISCLTGPTKRSTLAPGLLWWDLARQTASVAPKEEVAILDDNLVKGPEELPTGNKKPPGFLPTNEDRLFFLGQKELEGAGSWTPCVGHDGGRDQQETNL

SEQ ID NO: 144 - DNA, 1929 bp, Homo sapiens
  NIS ORF
atggaggccgtggagaccggggaacggcccaccttcggagcctgggactacggggtctttgccctcatgctcctggtgtccactggcatcgggctgtgggtcgggctggctcggggcgggcagcgcagcgctgaggacttcttcaccgggggccggcgcctggcggccctgcccgtgggcctgtcgctgtctgccagcttcatgtcggccgtgcaggtgctgggcgtgccgtcggaggcctatcgctatggcctcaagttcctctggatgtgcctgggccagcttctgaactcggtcctcaccgccctgctcttcatgcccgtcttctaccgcctgggcctcaccagcacctacgagtacctggagatgcgcttcagccgcgcagtgcggctctgcgggactttgcagtacattgtagccacgatgctgtacaccggcatcgtaatctacgcaccggccctcatcctgaaccaagtgaccgggctggacatctgggcgtcgctcctgtccaccggaattatctgcaccttctacacggctgtgggcggcatgaaggctgtggtctggactgatgtgttccaggtcgtggtgatgctaagtggcttctgggttgtcctggcacgcggtgtcatgcttgtgggcgggccccgccaggtgctcacgctggcccagaaccactcccggatcaacctcatggactttaaccctgacccgaggagccgctatacattctggacttttgtggtgggtggcacgttggtgtggctctccatgtatggcgtgaaccaggcgcaggtgcagcgctacgtggcttgccgcacagagaagcaggccaagctggccctgctcatcaaccaggtcggcctgttcctgatcgtgtccagcgctgcctgctgtggcatcgtcatgtttgtgttctacactgactgcgaccctctcctcctggggcgcatctctgccccagaccagtacatgcctctgctggtgctggacatcttcgaagatctgcctggagtccccgggcttttcctggcctgtgcttacagtggcaccctcagcacagcatccaccagcatcaatgctatggctgcagtcactgtagaagacctcatcaaacctcggctgcggagcctggcacccaggaaactcgtgattatctccaaggggctctcactcatctacggatcggcctgtctcaccgtggcagccctgtcctcactgctcggaggaggtgtccttcagggctccttcaccgtcatgggagtcatcagcggccccctgctgggagccttcatcttgggaatgttcctgccggcctgcaacacaccgggcgtcctcgcgggactaggcgcgggcttggcgctgtcgctgtgggtggccttgggcgccacgctgtacccacccagcgagcagaccatgagggtcctgccatcgtcggctgcccgctgcgtggctctctcagtcaacgcctctggcctcctggacccggctctcctccctgctaacgactccagcagggcccccagctcaggaatggacgccagccgacccgccttagctgacagcttctatgccatctcctatctctattacggtgccctgggcacgctgaccactgtgctgtgcggagccctcatcagctgcctgacaggccccaccaagcgcagcaccctggccccgggattgttgtggtgggacctcgcacggcagacagcatcagtggcccccaaggaagaagtggccatcctggatgacaacttggtcaagggtcctgaagaactccccactggaaacaagaagccccctggcttcctgcccaccaatgaggatcgtctgtttttcttggggcagaaggagctggagggggctggctcttggaccccctgtgttggacatgatggtggtcgagaccagcaggagacaaacctc

1. A method for inhibiting the development of a tumor resulting from cellular therapy in a subject receiving a cellular therapy, comprising:
(a) administering a cellular therapy composition to a subject; and
(b) systemically administering an oncolytic virus to the subject, wherein the oncolytic virus is administered in an amount sufficient to treat or prevent formation of tumors from contaminating tumor cells in the cellular therapy composition.

2. The method of claim 1, where the cellular therapy composition comprises stem cells, bone marrow cells, immune cells, non-immune cells or cells comprising a gene therapy vector.

3-6. (canceled)

7. The method of claim 1, wherein the virus and the cellular therapy composition are administered simultaneously, sequentially or intermittently.

8. The method of claim 1, wherein the cellular therapy composition is pre-treated with the virus prior to administration.

9. The method of claim 1, wherein the cellular therapy composition is administered systemically.

10-11. (canceled)

12. The method of claim 1, wherein the virus is administered in a single administration or multiple administrations.

13. The method of claim 1, wherein the virus is administered after the cellular therapy composition.

14. The method of claim 1, wherein the virus is administered intravenously, or mucosally.

15-23. (canceled)

24. The method of claim 1, wherein the cellular therapy composition treats a disease or disorder selected from among cardiovascular disease, cancer, diabetes, spinal cord injury, neurodegenerative disease, Alzheimer's disease, Parkinson's disease, multiple sclerosis, Amyotrophic lateral sclerosis, Duchenne Muscular Dystrophy, muscle damage or dystrophy, stroke, burns, lung disease, retinal disease, kidney disease, osteoarthritis, and rheumatoid arthritis.

25. The method of claim 1, wherein the cellular therapy composition comprises a cancer stem cells, and the virus infects the cancer stem cells in the cellular therapy composition.

26-35. (canceled)

36. The method of claim 1, wherein the virus is a vaccinia virus.

37. The method of claim 1, wherein the virus is a Lister strain virus.

38. The method of claim 37, wherein the virus is LIVP.

39. The method of claim 37, wherein the virus is selected from among, GLV-1h68, GLV-1i69, GLV-1h70, GLV-1h71, GLV-1h72, GLV-1h73, GLV-1h74, GLV-1h81, GLV-1h82, GLV-1h83, GLV-1h84, GLV-1h85, GLV-1h86, GLV-1j87, GLV-1j88, GLV-1j89, GLV-1h90, GLV-1h91, GLV-1 h92, GLV-1h96, GLV-1h97, GLV-1h98, GLV-1h100, GLV-1h101, GLV-1h139, GLV-1h104, GLV-1h105, GLV-1h106, GLV-1h107, GLV-1h108, GLV-1h109, GLV-1h146, GLV-1h150, GLV-1h151, GLV-1h152 and GLV-1h153.

40. The method of claim 1, wherein the virus is a pox virus.

41. (canceled)

42. The method of claim 1, further comprising detecting the virus in the subject.

43. The method of claim 42, wherein the virus is detected by fluorescence imaging, magnetic resonance imaging (MRI), single-photon emission computed tomography (SPECT), positron emission tomography (PET), scintigraphy, gamma camera, β+ detector, a γ detector or a combination thereof.

44. The method of claim 1, wherein the virus encodes a detectable protein or a protein that induces a detectable signal.

45. The method of claim 44, wherein the detectable protein is selected from among a luciferase or a fluorescent protein.

46. The method of claim 1, wherein the virus encodes a therapeutic gene product.

47. The method of claim 46, wherein the therapeutic gene product is an anti-cancer agent or anti-angiogenic agent.

48. The method of claim 47, wherein the therapeutic gene product is selected from among a cytokine, a chemokine, an immunomodulatory molecule, an antigen, an antibody or fragment thereof, antisense RNA, prodrug converting enzyme, siRNA, angiogenesis inhibitor, a toxin, an antitumor oligopeptide, a mitosis inhibitor protein, an antimitotic oligopeptide, an anti-cancer polypeptide antibiotic, a transporter protein, and tissue factor.

49. The method of claim 1, further comprising administering an anticancer agent.

50. The method of claim 49, wherein the anticancer agent is selected from among a cytokine, a chemokine, a growth factor, a photosensitizing agent, a toxin, an anti-cancer antibiotic, a chemotherapeutic compound, a radionuclide, an angiogenesis inhibitor, a signaling modulator, an anti-metabolite, an anti-cancer vaccine, an anti-cancer oligopeptide, a mitosis inhibitor protein, an antimitotic oligopeptide, an anti-cancer antibody, an anti-cancer antibiotic, an immunotherapeutic agent, hyperthermia or hyperthermia therapy, a bacterium, radiation therapy and a combination of any of the preceding.

51-76. (canceled)
